(19) United States
(12) Patent Application Publication
(10) Pub. No.: US 2025/0049867 A1
(43) Pub. Date: Feb. 13, 2025

(54) ENGINEERED ONCOLYTIC HERPESVIRUSES

(71) Applicant: VIROGIN BIOTECH CANADA LTD., Richmond (CA)

(72) Inventors: Michael FLOYD, Revere, MA (US); Peter GRZESIK, Seattle, WA (US); Edward M. KENNEDY, Andover, MA (US); Terry FARKALY, Malden, MA (US); Lorena LERNER, Andover, MA (US); Sonia FEAU, Chestnut Hill, MA (US); Craig A. STRATHDEE, Cambridge, MA (US); Christophe QUÉVA, Andover, MA (US)

(21) Appl. No.: 18/686,229

(22) PCT Filed: Aug. 31, 2022
(86) PCT No.: PCT/US2022/075767

§ 371 Date: Feb. 23, 2024

Related U.S. Application Data
(60) Provisional application No. 63/301,419, filed on Jan. 20, 2022.
(60) Provisional application No. 63/278,569, filed on Nov. 12, 2021.
(60) Provisional application No. 63/238,997, filed on Aug. 31, 2021.

(51) Int. Cl. A61K 35/763; C07K 14/52; C07K 14/54; C07K 16/22; C07K 16/28; C12N 7/00; C12N 9/04; C12N 9/26; C12N 9/78; C12N 15/86

(52) U.S. Cl. CPC A61K 35/763; C07K 14/521; C07K 14/5434; C07K 16/22; C07K 16/2818; C12N 7/00; C12N 9/0006; C12N 9/2474; C12N 9/78; C12N 15/86; C07K 2317/565; C07K 2317/76; C12N 2710/16632; C12N 2710/16643; C12N 2710/16645; C12N 2710/16662; C12N 2800/22; C12Y 101/01141; C12Y 302/01035; C12Y 305/04004

(57) ABSTRACT

The present disclosure relates to recombinant oncolytic viral vectors for the treatment and prevention of cancers such as glioblastoma. The oncolytic viral vectors comprise one or more of the following features: miRNA target sequence(s) for viral replication restriction; transgene(s) encoding one or more payload molecules; a retargeting domain; mutation(s) in both UL30 and UL23 genes; and a protein with a syncytial mutation and a counterpart protein without the syncytial mutation.

### CROSS-REFERENCE TO RELATED APPLICATIONS

[0001] This application claims the benefit of U.S. Provisional Application No. 63/238,997, filed Aug. 31, 2021, U.S. Provisional Application No. 63/278,569, filed Nov. 12, 2021, and U.S. Provisional Application No. 63/301,419, filed Jan. 20, 2022, all of which are herein incorporated by reference in their entireties.

### REFERENCE TO AN ELECTRONIC SEQUENCE LISTING

[0002] The contents of the electronic sequence listing (ONCR_022_02WO_SeqList_ST26.xml; Size: 1,315,454 bytes; and Date of Creation: Aug. 30, 2022) is herein incorporated by reference in its entirety.

### FIELD

[0003] The present disclosure relates to recombinant viral vectors for the treatment and prevention of cancer. In some embodiments, the disclosure relates to oncolytic HSV vectors for treating glioblastoma.

### BACKGROUND

[0004] Oncolytic viruses, such as oncolytic herpes simplex virus (HSV), preferentially infect cancer cells and have been used in multiple pre-clinical and clinical studies for cancer treatment. But many hurdles remain, including the needs for enhanced safety profile, prolonged antitumor activity, and enhanced ability to overcome the immunosuppressive tumor microenvironment.

[0005] Glioblastoma (GBM) is the most common type of primary brain tumor in adults, with a 5-year overall survival of 6.8%. Therapeutic intervention of GBM must overcome three major impediments: drug delivery that is impeded by the blood-brain barrier; a high degree of intra-tumoral heterogeneity with at least three molecular subtypes co-existing within each tumor; and a strong immunosuppressive tumor microenvironment.

[0006] There remains a need in the art for improved oncolytic viral vectors. The present disclosure provides such improved oncolytic viral vectors, and more.

### SUMMARY

[0007] In one aspect, the disclosure provides recombinant herpesviruses, wherein the viral genome of the recombinant herpesvirus:
[0008] (a) comprises one or more transgenes, optionally wherein the open reading frame(s) (ORFs) of the transgene(s) have a G/C content of at least 60%, at least 61%, at least 62%, at least 63%, or at least 64%;
[0009] (b) comprises one or more miRNA target sequences;
[0010] (c) comprises a polynucleotide encoding a retargeting domain;
[0011] (d) comprises a UL30 viral gene encoding a DNA polymerase catalytic subunit (DPCS) and a UL23 viral gene encoding a thymidine kinase (TK), wherein the DPCS comprises a mutation, and wherein the TK comprises a mutation;
[0012] (e) encodes a first gB and/or a second gB, wherein the first gB comprises a syncytial mutation, and wherein the second gB comprises no syncytial mutation;
[0013] (f) encodes a first gK and/or a second gK, wherein the first gK comprises a syncytial mutation, and wherein the second gK comprises no syncytial mutation;
[0014] (g) encodes a first gH and/or a second gH, wherein the first gH comprises a syncytial mutation, and wherein the second gH comprises no syncytial mutation;
[0015] (h) encodes a first UL20 and/or a second UL20, wherein the first UL20 comprises a syncytial mutation, and wherein the second UL20 comprises no syncytial mutation; and/or
[0016] (i) encodes a first UL24 and/or a second UL24, wherein the first UL24 comprises a syncytial mutation, and wherein the second UL24 comprises no syncytial mutation.

[0017] In some embodiments, the recombinant herpesvirus comprises one or more transgenes encoding one or more payload proteins selected from 15-hydroxyprostaglandin dehydrogenase [NAD(+)] (HPGD), adenosine deaminase 2 (ADA2), hyaluronidase-1 (HYAL1), hemotaxis inhibitory protein (CHP), C-C motif chemokine 21 (CCL21), interleukin-12 (IL-12), a CD47 antagonist, a transforming growth factor beta (TGFβ) antagonist, a programmed death-1 (PD1) antagonist, a triggering receptor expressed on myeloid cells-2 (TREM2) antagonist, a biomolecule comprising chlorotoxin (CTX), or any combinations thereof. In some embodiments, the one or more payload proteins comprise or consist of IL-12, a PD1 antagonist, and a TREM2 antagonist. In some embodiments, the one or more payload proteins comprise HPGD. In some embodiments, the one or more payload proteins comprise a biomolecule comprising CTX.

[0018] In some embodiments, the one or more payload proteins comprise or consist of one of the combinations of payload proteins listed in Tables 4-7 of the disclosure.

[0019] In some embodiments, the one or more payload proteins comprise HPGD. In some embodiments, the one or more payload proteins comprise ADA2. In some embodiments, the one or more payload proteins comprise HYAL1. In some embodiments, the one or more payload proteins comprise CHP. In some embodiments, the one or more payload proteins comprise CCL21. In some embodiments, the one or more payload proteins comprise IL-12. In some embodiments, the one or more payload proteins comprise the CD47 antagonist. In some embodiments, the one or more payload proteins comprise the TGFβ antagonist. In some embodiments, the one or more payload proteins comprise the PD1 antagonist. In some embodiments, the one or more payload proteins comprise the TREM2 antagonist. In some embodiments, the antagonist comprises an antibody or antigen binding fragment thereof. In some embodiments, the one or more payload proteins comprise the biomolecule comprising CTX. In some embodiments, the biomolecule comprising CTX further comprises a T-cell engager moiety specifically binding to a protein expressed on the surface of the T-cell. In some embodiments, the protein expressed on the surface of the T-cell is CD3. In some embodiments, the T-cell engager moiety comprises an amino acid sequence at least 90%, at least 95%, at least 97%, at least 98%, at least 99%, or 100% identical to SEQ ID NO: 914. In some embodiments, the CTX comprises or consists of an amino acid sequence at least 95% identical to SEQ ID NO: 913.

[0020] In some embodiments, the HPGD comprises an amino acid sequence at least 90%, at least 95%, at least 97%, at least 98%, at least 99%, or 100% identical to SEQ ID NO: 875. In some embodiments, the ADA2 comprises an amino acid sequence at least 90%, at least 95%, at least 97%, at least 98%, at least 99%, or 100% identical to SEQ ID NO: 877. In some embodiments, the HYAL1 comprises an amino acid sequence at least 90%, at least 95%, at least 97%, at least 98%, at least 99%, or 100% identical to SEQ ID NO: 878. In some embodiments, the CHP comprises an amino acid sequence at least 90%, at least 95%, at least 97%, at least 98%, at least 99%, or 100% identical to SEQ ID NO: 880. In some embodiments, the CCL21 comprises an amino acid sequence at least 90%, at least 95%, at least 97%, at least 98%, at least 99%, or 100% identical to SEQ ID NO: 881. In some embodiments, the IL-12 comprises a subunit alpha comprising an amino acid sequence at least 90%, at least 95%, at least 97%, at least 98%, at least 99%, or 100% identical to SEQ ID NO: 883 and a subunit beta comprising an amino acid sequence at least 90%, at least 95%, at least 97%, at least 98%, at least 99%, or 100% identical to SEQ ID NO: 884. In some embodiments, the CD47 antagonist comprises VHH CDR1 of SEQ ID NO: 895, VHH CDR2 of SEQ ID NO: 896, VHH CDR3 of SEQ ID NO: 897, and/or an amino acid sequence at least 90%, at least 95%, at least 97%, at least 98%, at least 99%, or 100% identical to SEQ ID NO: 887 or 888. In some embodiments, the TGFβ antagonist comprises a heavy chain variable domain (VH) comprising CDR1 of SEQ ID NO: 898, CDR2 of SEQ ID NO: 899, and CDR3 of SEQ ID NO: 900, and/or a light chain variable domain (VL) comprising CDR1 of SEQ ID NO: 901, CDR2 of SEQ ID NO: 902, and CDR3 of SEQ ID NO: 903. In some embodiments, the TGFβ antagonist comprises an amino acid sequence at least 90%, at least 95%, at least 97%, at least 98%, at least 99%, or 100% identical to SEQ ID NO: 889 or 890. In some embodiments, the PD1 antagonist comprises VHH CDR1 of SEQ ID NO: 904, VHH CDR2 of SEQ ID NO: 905, VHH CDR3 of SEQ ID NO: 906, and/or an amino acid sequence at least 90%, at least 95%, at least 97%, at least 98%, at least 99%, or 100% identical to SEQ ID NO: 891 or 892. In some embodiments, the TREM2 antagonist comprises a heavy chain variable domain (VH) comprising CDR1 of SEQ ID NO: 907, CDR2 of SEQ ID NO: 908, CDR3 of SEQ ID NO: 909, and/or an amino acid sequence at least 90%, at least 95%, at least 97%, at least 98%, at least 99%, or 100% identical to SEQ ID NO: 893; and/or a light chain variable domain (VL) comprising CDR1 of SEQ ID NO: 910, CDR2 of SEQ ID NO: 911, CDR3 of SEQ ID NO: 912, and/or an amino acid sequence at least 90%, at least 95%, at least 97%, at least 98%, at least 99%, or 100% identical to SEQ ID NO: 894. In some embodiments, the biomolecule comprising CTX comprises an amino acid sequence at least 90%, at least 95%, at least 97%, at least 98%, at least 99%, or 100% identical to SEQ ID NO: 915 or 916.

[0021] In some embodiments, the ORF of at least one of the transgene(s) has G/C content of at least 60%, at least 61%, at least 62%, at least 63%, or at least 64%. In some embodiments, the ORFs of all of the transgene(s) have G/C content of at least 60%, at least 61%, at least 62%, at least 63%, or at least 64%. In some embodiments, the ORFs of the transgene(s) encoding IL-12, the PD1 antagonist, the TREM2 antagonist, HPGD, and/or the biomolecule comprising CTX have a G/C content of at least 60%, at least 61%, at least 62%, at least 63%, or at least 64%. In some embodiments, the expression of a payload protein encoded by the ORF of the transgene is at least 2-fold, at least 3-fold, at least 5-fold, at least 8-fold, or at least 10-fold higher than the expression of the payload protein encoded by a control ORF having a G/C content of about 52% in a control recombinant herpesvirus. In some embodiments, the control ORF is codon optimized based on the codon usage of Homo sapiens. In some embodiments, the ORF(s) of the transgene(s) are codon optimized based on the codon usage of Anaeromyxobacter dehalogenans. In some embodiments, the transgene(s) encode an antibody or antigen binding fragment thereof. In some embodiments, the antibody or antigen binding fragment thereof comprises a heavy chain variable domain (VH) and a light chain variable domain (VL). In some embodiments, the transgene encoding the TREM2 antagonist comprises a polynucleotide sequence at least 90%, at least 95%, at least 97%, at least 98%, at least 99%, or 100% identical to SEQ ID NO: 938. In some embodiments, the antibody or antigen binding fragment thereof comprises a VHH domain derived from a single domain antibody (sdAb). In some embodiments, the antibody or antigen binding fragment thereof comprises an IgG-Fc. In some embodiments, the IgG is IgG1. In some embodiments, the transgene encoding the PD1 antagonist comprises a polynucleotide sequence at least 90%, at least 95%, at least 97%, at least 98%, at least 99%, or 100% identical to SEQ ID NO: 937. In some embodiments, the transgene encoding the biomolecule comprising CTX comprises a polynucleotide sequence at least 90%, at least 95%, at least 97%, at least 98%, at least 99%, or 100% identical to SEQ ID NO: 940 or 941. In some embodiments, the transgene(s) encode cytokine, a chemokine, a receptor, a receptor ligand, an enzyme, and/or a reporter protein. In some embodiments, the transgene encoding IL-12 comprise a polynucleotide sequence at least 90%, at least 95%, at least 97%, at least 98%, at least 99%, or 100% identical to SEQ ID NO: 936. In some embodiments, the transgene encoding HPGD comprises a polynucleotide sequence at least 90%, at least 95%, at least 97%, at least 98%, at least 99%, or 100% identical to SEQ ID NO: 939.

[0022] In some embodiments, the recombinant herpesvirus comprises the miRNA target sequences for miR-34b-5p, miR-34b-3p, miR-34c-5p, miR-122-5p, miR-124-3p, miR-128T, miR-129-5p, miR-129-2-3p, miR-132-3p, miR-137-3p, miR-145-5p, or any combination thereof. In some embodiments, the recombinant herpesvirus comprises the miRNA target sequences for miR-34b-5p, miR-34c-5p, miR-122-5p, miR-124-3p, miR-128T, miR-129-2-3p, miR-132-3p, miR-137-3p, miR-145-5p, or any combination thereof. In some embodiments, the recombinant herpesvirus comprises the miRNA target sequences for miR-34b-5p, miR-34c-5p, miR-122-5p, miR-124-3p, miR-128T, miR-129-2-3p, miR-132-3p, miR-137-3p, and miR-145-5p.

[0023] In some embodiments, the recombinant herpesvirus comprises:
[0024] (a) one or more miRNA target sequences for miR-122-5p;
[0025] (b) one or more miRNA target sequences for miR-145-5p;
[0026] (c) one or more miRNA target sequences for miR-124-3p, miR-128T, miR-137-3p, or any combination thereof;
[0027] (d) one or more miRNA target sequences for miR-34b-5p, miR-34c-5p, or any combination thereof; and
[0028] (e) one or more miRNA target sequences for miR-129-2-3p, miR-132-3p, or any combination thereof.

[0029] In some embodiments, the recombinant herpesvirus comprises a first miR-TS cassette inserted into a first viral gene, wherein the first miR-TS cassette comprises one or more miRNA target sequences for each of miR-34c-5p, miR-124-3p, miR-129-2-3p, and miR-132-3p. In some embodiments, the miRNA target sequences in the first miR-TS cassette are arranged as (34c-5p)-(124-3p)-(132-3p)-(129-2-3p)-(34c-5p)-(124-3p)-(129-2-3p)-(132-3p)-(124-3p)-(129-2-3p)-(132-3p)-(34c-5p). In some embodiments, the first miR-TS cassette comprises a nucleic acid sequence at least 90%, at least 95%, at least 96%, at least 97%, at least 98%, at least 99%, or 100% identical to SEQ ID NO: 859. In some embodiments, the first viral gene is ICP8.

[0030] In some embodiments, the recombinant herpesvirus comprises a second miR-TS cassette inserted into a second viral gene, wherein the second miR-TS cassette comprises one or more miRNA target sequences for each of miR-122-5p, miR-124-3p, miR-128T, and miR-137-3p. In some embodiments, the miRNA target sequences in the second miR-TS cassette are arranged as (137-3p)-(128T)-(122-5p)-(124-3p)-(122-5p)-(128T)-(137-3p)-(124-3p)-(128T)-(137-3p)-(124-3p)-(122-5p). In some embodiments, the second miR-TS cassette comprises a nucleic acid sequence at least 90%, at least 95%, at least 96%, at least 97%, at least 98%, at least 99%, or 100% identical to SEQ ID NO: 858. In some embodiments, the second viral gene is ICP4. In some embodiments, the recombinant herpesvirus comprises the second miR-TS cassette in both ICP4 viral genes of the viral genome.

[0031] In one aspect, the disclosure provides recombinant herpesviruses comprising one or more miRNA target sequences in both ICP4 viral genes of the viral genome. In some embodiments, the miRNA target sequences are the same in both said ICP4 viral genes.

[0032] In some embodiments, the recombinant herpesvirus comprises a third miR-TS cassette inserted into a third viral gene, wherein the third miR-TS cassette comprises one or more miRNA target sequences for each of miR-34c-5p, miR-124-3p, miR-128T, and miR-137-3p.

[0033] In some embodiments, the miRNA target sequences in the third miR-TS cassette are arranged as (124-3p)-(128T)-(34c-5p)-(137-3p)-(128T)-(34c-5p)-(137-3p)-(124-3p)-(128T)-(137-3p)-(124-3p)-(34c-5p). In some embodiments, the third miR-TS cassette comprises a nucleic acid sequence at least 90%, at least 95%, at least 96%, at least 97%, at least 98%, at least 99%, or 100% identical to SEQ ID NO: 873. In some embodiments, the recombinant herpesvirus comprises a third miR-TS cassette inserted into a third viral gene, wherein the third miR-TS cassette comprises one or more miRNA target sequences for each of miR-34b-3p, miR-34c-5p, miR-128T, miR-137-3p. In some embodiments, the third viral gene is ICP27.

[0034] In some embodiments, the recombinant herpesvirus comprises a fourth miR-TS cassette inserted into a fourth viral gene, wherein:
[0035] (i) the fourth miR-TS cassette comprises one or more miRNA target sequences for each of miR-34b-5p, miR-34c-5p, miR-129-5p, and miR-145-5p;
[0036] (ii) the fourth miR-TS cassette comprises one or more miRNA target sequences for each of miR-34b-5p, miR-34c-5p, miR-132-3p, and miR-145-5p; or
[0037] (iii) the fourth miR-TS cassette comprises one or more miRNA target sequences for each of miR-34b-3p, miR-34c-5p, miR-132-3p, and miR-145-5p.
   In some embodiments, wherein the fourth miR-TS cassette comprises one or more miRNA target sequences for each of miR-34b-5p, miR-34c-5p, miR-132-3p, and miR-145-5p. In some embodiments, the miRNA target sequences in the fourth miR-TS cassette are arranged as (145-5p)-(34b-5p)-(132-3p)-(34c-5p)-(145-5p)-(34c-5p)-(34b-5p)-(132-3p)-(34b-5p)-(145-5p)-(132-3p)-(34c-5p). In some embodiments, the fourth miR-TS cassette comprises a nucleic acid sequence at least 90%, at least 95%, at least 96%, at least 97%, at least 98%, at least 99%, or 100% identical to SEQ ID NO: 874. In some embodiments, the fourth viral gene is UL8.

[0038] In some embodiments, each of the miR-TS cassettes comprises at least 2, at least 3, or at least 4 copies of each of the miRNA target sequences. In some embodiments, each of the miR-TS cassettes comprises 3 copies of each of the miRNA target sequences.

[0039] In some embodiments, the replication of the recombinant HSV is reduced in a non-cancerous cell compared to the replication of the recombinant HSV in a cancerous cell. In some embodiments, the cancerous cell is a glioblastoma cell. In some embodiments, the non-cancerous cell is selected from the group consisting of a neuron, an ependymal cell, an oligodendrocyte, an endothelial cell, a hepatocyte, an astrocyte, and any combination thereof. In some embodiments, wherein the non-cancerous cell is an astrocyte.

[0040] In some embodiments, the one or more miRNA target sequences for miR-34b-5p comprise or consist of SEQ ID NO: 867. In some embodiments, the one or more miRNA target sequences for miR-34b-3p comprise or consist of SEQ ID NO: 868. In some embodiments, the one or more miRNA target sequences for miR-34c-5p comprise or consist of SEQ ID NO: 869. In some embodiments, the one or more miRNA target sequences for miR-122-5p comprise or consist of SEQ ID NO: 804. In some embodiments, the one or more miRNA target sequences for miR-124-3p comprise or consist of SEQ ID NO: 805. In some embodiments, the one or more miRNA target sequences for miR-128T comprise or consist of SEQ ID NO: 870. In some embodiments, the one or more miRNA target sequences for miR-129-5p comprise or consist of SEQ ID NO: 813. In some embodiments, the one or more miRNA target sequences for miR-129-2-3p comprise or consist of SEQ ID NO: 871. In some embodiments, the one or more miRNA target sequences for miR-132-3p comprise or consist of SEQ ID NO: 872. In some embodiments, the one or more miRNA target sequences for miR-137-3p comprise or consist of SEQ ID NO: 819. In some embodiments, the one or more miRNA target sequences for miR-145-5p comprise or consist of SEQ ID NO: 823.

[0041] In some embodiments, the recombinant herpesvirus comprises the polynucleotide encoding the retargeting domain, wherein the retargeting domain specifically binds a target protein expressed by a target cell. In some embodiments, the polynucleotide encoding the retargeting domain is inserted into the open reading frame of a US6 gene encoding a glycoprotein D (gD). In some embodiments, the polynucleotide encoding the retargeting domain replaces the US6 gene region encoding an amino acid sequence corresponding to amino acids 6-24 of SEQ ID NO: 921. In some embodiments, the target protein expressed by the target cell comprises integrin α5β1, integrin αvβ1, integrin αvβ3, integrin αvβ6, or a combination thereof. In some embodiments, the target protein expressed by the target cell comprises epidermal growth factor receptor (EGFR). In some embodiments, the retargeting domain comprises a knottin peptide capable of specifically binding to the target protein expressed by the target cell. In some embodiments, the retargeting domain comprises no more than 50, no more than 45, no more than 40, or no more than 35 amino acids. In some embodiments, the retargeting domain comprises an amino acid sequence having at least 80%, at least 85%, at least 90%, or 100% identity to SEQ ID NO: 922. In some embodiments, the retargeting domain comprises an immunoglobulin domain capable of specifically binding to the target protein expressed by the target cell. In some embodiments, the retargeting domain comprises a binding domain of, or a binding domain derived from, a variable domain of a heavy chain-only antibody (VHH) or a variable domain of new antigen receptor immunoglobulin (V-NAR). In some embodiments, the retargeting domain comprises no more than 150, no more than 140, or no more than 130 amino acids. In some embodiments, the retargeting domain comprises an amino acid sequence having at least 80%, at least 85%, at least 90%, or 100% identity to SEQ ID NO: 923. In some embodiments, the herpesvirus is capable of infecting the target cell expressing the target protein. In some embodiments, the herpesvirus is capable of infecting cells without Nectin-1 expression. In some embodiments, the cells are Vero cells.

[0042] In some embodiments, the recombinant herpesvirus comprises the UL30 viral gene encoding the DPCS comprising the mutation and the UL23 viral gene encoding the TK comprising the mutation. In some embodiments, the mutation in the DPCS increases DNA replication fidelity of the herpesvirus by at least 10%, at least 20%, at least 30%, at least 50%, at least 100%, at least 2-fold, at least 3-fold, or at least 5-fold. In some embodiments, the mutation in the DPCS is at an amino acid position corresponding to L774 of SEQ ID NO: 917. In some embodiments, the mutation is an amino acid substitution. In some embodiments, the mutation in the DPCS is the amino acid substitution corresponding to L774F of SEQ ID NO: 917. In some embodiments, the DPCS comprises an amino acid sequence at least 90%, at least 95%, at least 97%, at least 98%, at least 99%, or 100% identical to SEQ ID NO: 917, except for the mutation in the DPCS. In some embodiments, the IC50 of acyclovir is less than 0.5 ug/ml, less than 1.0 ug/ml, less than 1.5 ug/ml, or less than 2.0 ug/ml for the herpesvirus. In some embodiments, the mutation in the TK decreases the IC50 of acyclovir for the herpesvirus by at least 1-fold, at least 2-fold, at least 5-fold, at least 10-fold, at least 20-fold, at least 50-fold, or at least 100-fold. In some embodiments, the mutation in the TK is at one or more amino acid positions corresponding to L159, 1160, F161, A168 and/or L169 of SEQ ID NO: 918. In some embodiments, the mutation is amino acid substitution. In some embodiments, the mutation in the TK comprises one or more amino acid substitutions of:
[0043] (a) L159I or L159L;
[0044] (b) I160L or I160F;
[0045] (c) F161A, F161V, F161P, or F161L;
[0046] (d) A168D, A168Y, A168V or A168F; and/or
[0047] (e) L169F, L169Y, L169L, L169I, L169M, L169N, or L169K.
   In some embodiments, the mutation in the TK comprises amino acid substitutions corresponding to L159I, 1160F, F161L, A168F and L169M of SEQ ID NO: 918. In some embodiments, the mutation in the TK comprises amino acid substitutions corresponding to I160F, F161A, and A168F of SEQ ID NO: 918. In some embodiments, the mutation in the TK comprises amino acid substitutions corresponding to 1160F, F161L, A168F, and L169N of SEQ ID NO: 918. In some embodiments, the TK comprises an amino acid sequence at least 90%, at least 95%, at least 97%, at least 98%, at least 99%, or 100% identical to SEQ ID NO: 918, except the mutation in the TK.

[0048] In some embodiments, the viral genome of the herpesvirus encodes:
[0049] (i) the first gB and/or the second gB, wherein the first gB comprises the syncytial mutation, and wherein the second gB comprises no syncytial mutation;
[0050] (ii) the first gK and/or the second gK, wherein the first gK comprises the syncytial mutation, and wherein the second gK comprises no syncytial mutation;
[0051] (iii) the first gH and/or the second gH, wherein the first gH comprises the syncytial mutation, and wherein the second gH comprises no syncytial mutation;
[0052] (iv) the first UL20 and/or the second UL20, wherein the first UL20 comprises the syncytial mutation, and wherein the second UL20 comprises no syncytial mutation; and/or
[0053] (v) the first UL24 and/or the second UL24, wherein the first UL24 comprises the syncytial mutation, and wherein the second UL24 comprises no syncytial mutation.
   In some embodiments, the first gB is encoded by an endogenous gB-encoding gene locus and the second gB is encoded by an exogenous expression cassette. In some embodiments, the first gB is encoded by an exogenous expression cassette and the second gB is encoded by an endogenous gB-encoding gene locus. In some embodiments, the first gK is encoded by an endogenous gK-encoding gene locus and the second gK is encoded by an exogenous expression cassette. In some embodiments, the first gK is encoded by an exogenous expression cassette and the second gK is encoded by an endogenous gK-encoding gene locus. In some embodiments, the first gH is encoded by an endogenous gH-encoding gene locus and the second gH is encoded by an exogenous expression cassette. In some embodiments, the first gH is encoded by an exogenous expression cassette and the second gH is encoded by an endogenous gH-encoding gene locus. In some embodiments, the first UL20 is encoded by an endogenous UL20 gene locus and the second UL20 is encoded by an exogenous expression cassette. In some embodiments, the first UL20 is encoded by an exogenous expression cassette and the second UL20 is encoded by an endogenous UL20 gene locus. In some embodiments, the first UL24 is encoded by an endogenous UL24 gene locus and the second UL24 is encoded by an exogenous expression cassette. In some embodiments, the first UL24 is encoded by an exogenous expression cassette and the second UL24 is encoded by an endogenous UL24 gene locus.

[0054] In some embodiments, the viral genome of the herpesvirus encodes the first gB but not the second gB. In some embodiments, the viral genome of the herpesvirus encodes the first gK but not the second gK. In some embodiments, the viral genome of the herpesvirus encodes the first gH but not the second gH. In some embodiments, the viral genome of the herpesvirus encodes the first UL20 but not the second UL20. In some embodiments, the viral genome of the herpesvirus encodes the first UL24 but not the second UL24. In some embodiments, the viral genome of the herpesvirus encodes the first gB and the first gK; optionally, the viral genome of the herpesvirus further encodes the first gH and the first UL24.

[0055] In some embodiments, the exogenous expression cassette is located at UL3-UL4 intergenic region. In some embodiments, the exogenous expression cassette is located at UL50-UL51 intergenic region.

[0056] In some embodiments, the recombinant herpesvirus displays syncytial phenotype in cancer cells.

[0057] In one aspect, the disclosure provides cells comprising a recombinant nucleic acid encoding the recombinant herpesvirus of the disclosure.

[0058] In one aspect, the disclosure provides cells comprising a first nucleic acid encoding a recombinant herpesvirus and a second nucleic acid, wherein:
[0059] (i) the viral genome of the herpesvirus encodes a first gB, wherein the first gB comprises a syncytial mutation, the second nucleic acid encodes a second gB, wherein the second gB comprises no syncytial mutation; or, the viral genome of the herpesvirus encodes a second gB, wherein the second gB comprises no syncytial mutation, the second nucleic acid encodes a first gB, wherein the first gB comprises a syncytial mutation;
[0060] (ii) the viral genome of the herpesvirus encodes a first gK, wherein the first gK comprises a syncytial mutation, the second nucleic acid encodes a second gK, wherein the second gK comprises no syncytial mutation; or the viral genome of the herpesvirus encodes a second gK, wherein the second gK comprises no syncytial mutation, the second nucleic acid encodes a first gK, wherein the first gK comprises a syncytial mutation;
[0061] (iii) the viral genome of the herpesvirus encodes a first gH, wherein the first gH comprises a syncytial mutation, the second nucleic acid encodes a second gH, wherein the second gH comprises no syncytial mutation; or the viral genome of the herpesvirus encodes a second gH, wherein the second gH comprises no syncytial mutation, the second nucleic acid encodes a first gH, wherein the first gH comprises a syncytial mutation;
[0062] (iv) the viral genome of the herpesvirus encodes a first UL20, wherein the first UL20 comprises a syncytial mutation, the second nucleic acid encodes a second UL20, wherein the second UL20 comprises no syncytial mutation; or the viral genome of the herpesvirus encodes a second UL20, wherein the second UL20 comprises no syncytial mutation, the second nucleic acid encodes a first UL20, wherein the first UL20 comprises a syncytial mutation; and/or
[0063] (v) the viral genome of the herpesvirus encodes a first UL24, wherein the first UL24 comprises a syncytial mutation, the second nucleic acid encodes a second UL24, wherein the second UL24 comprises no syncytial mutation; or the viral genome of the herpesvirus encodes a second UL24, wherein the second UL24 comprises no syncytial mutation, the second nucleic acid encodes a first UL24, wherein the first UL24 comprises a syncytial mutation.

[0064] In some embodiments, the viral genome of the herpesvirus encodes a first gB, wherein the first gB comprises a syncytial mutation, wherein the second nucleic acid encodes a second gB, wherein the second gB comprises no syncytial mutation. In some embodiments, the viral genome of the herpesvirus encodes a second gB, wherein the second gB comprises no syncytial mutation, wherein the second nucleic acid encodes a first gB, wherein the first gB comprises a syncytial mutation. In some embodiments, the viral genome of the herpesvirus encodes a first gK, wherein the first gK comprises a syncytial mutation, wherein the second nucleic acid encodes a second gK, wherein the second gK comprises no syncytial mutation. In some embodiments, the viral genome of the herpesvirus encodes a second gK, wherein the second gK comprises no syncytial mutation, wherein the second nucleic acid encodes a first gK, wherein the first gK comprises a syncytial mutation. In some embodiments, the viral genome of the herpesvirus encodes a first gH, wherein the first gH comprises a syncytial mutation, wherein the second nucleic acid encodes a second gH, wherein the second gH comprises no syncytial mutation. In some embodiments, the viral genome of the herpesvirus encodes a second gH, wherein the second gH comprises no syncytial mutation, wherein the second nucleic acid encodes a first gH, wherein the first gH comprises a syncytial mutation. In some embodiments, the viral genome of the herpesvirus encodes a first UL20, wherein the first UL20 comprises a syncytial mutation, wherein the second nucleic acid encodes a second UL20, wherein the second UL20 comprises no syncytial mutation. In some embodiments, the viral genome of the herpesvirus encodes a second UL20, wherein the second UL20 comprises no syncytial mutation, wherein the second nucleic acid encodes a first UL20, wherein the first UL20 comprises a syncytial mutation. In some embodiments, the viral genome of the herpesvirus encodes a first UL24, wherein the first UL24 comprises a syncytial mutation, wherein the second nucleic acid encodes a second UL24, wherein the second UL24 comprises no syncytial mutation. In some embodiments, the viral genome of the herpesvirus encodes a second UL24, wherein the second UL24 comprises no syncytial mutation, wherein the second nucleic acid encodes a first UL24, wherein the first UL24 comprises a syncytial mutation. In some embodiments, the recombinant herpesvirus comprises a single copy of gB-encoding viral gene, a single copy of gK-encoding viral gene, a single copy of gH-encoding viral gene, a single copy of UL20 viral gene, and/or a single copy of UL24 viral gene. In some embodiments, the first nucleic acid and the second nucleic acid are comprised within a single polynucleotide molecule. In some embodiments, the first nucleic acid and the second nucleic acid are comprised within two different polynucleotide molecules. In some embodiments, the cell is a Vero cell.

[0065] In some embodiments, the gB syncytial mutation comprises a mutation at one or more amino acid residues corresponding to R796, R800, T813, L817, S854, A855, R858, or A874, an insertion between E816 and L817, a deletion of S869 to C-terminus, a deletion of T877 to C-terminus, or a combination thereof, of SEQ ID NO: 919. In some embodiments, the gB syncytial mutation comprises one or more mutations corresponding to R796C, R800W, T813I, L817H, L817P, S854F, A855V, R858C, R858H, A874P, an insertion of VN or VNVN between E816 and L817, a deletion of S869 to C-terminus, or a deletion of T877 to C-terminus, of SEQ ID NO: 919. In some embodiments, the gB syncytial mutation comprises a deletion of T877 to C-terminus according to SEQ ID NO: 919. In some embodiments, the first and/or the second gB comprise a mutation corresponding to D285N and/or A549T of SEQ ID NO: 919.

[0066] In some embodiments, the gK syncytial mutation comprises a mutation at one or more amino acid residues corresponding to P33, A40, L86, D99, A111, L118, T121, C243, L304, 1307, or R310 of SEQ ID NO: 920. In some embodiments, the gK syncytial mutation comprises one or more mutations corresponding to P33S, A40V, A40T, L86P, D99N, A111V, L118Q, T121I, C243Y, L304P, 1307N, or R310L of SEQ ID NO: 920. In some embodiments, the gK syncytial mutation comprises 1307N according to SEQ ID NO: 920.

[0067] In some embodiments, the gH syncytial mutation comprises a mutation at one or more amino acid residues corresponding to N753 or A778 of SEQ ID NO: 943. In some embodiments, the gH syncytial mutation comprises one or more mutations corresponding to N753K or A778V of SEQ ID NO: 943.

[0068] In some embodiments, the UL20 syncytial mutation comprises a mutation at one or more amino acid residues corresponding to Y49, S50, R51, R209, T212, R213, or C-terminal deletion after N217, of SEQ ID NO: 944. In some embodiments, the UL20 syncytial mutation comprises one or more mutations corresponding to Y49A, S50A, R51A, R209A, T212A, R213A, or C-terminal deletion after N217, of SEQ ID NO: 944.

[0069] In some embodiments, the UL24 syncytial mutation comprises a mutation at one or more amino acid residues corresponding to T64, R63, or V64 of SEQ ID NO: 942. In some embodiments, the UL24 syncytial mutation comprises one or more mutations corresponding to T64G, R63V, or V64S of SEQ ID NO: 942.

[0070] In some embodiments, the open reading frame encoding the first gB is operably linked to a CMV promoter and/or a bGH polyA tail. In some embodiments, the open reading frame encoding the second gB is operably linked to a CMV promoter and/or a bGH polyA tail. In some embodiments, the open reading frame encoding the first gK is operably linked to a CMV promoter and/or a bGH poly A tail. In some embodiments, the open reading frame encoding the second gK is operably linked to a CMV promoter and/or a bGH polyA tail.

[0071] In some embodiments, the yield of the recombinant herpesvirus is at least 1-fold, at least 2-fold, at least 3-fold, at least 5-fold, at least 8-fold, at least 10-fold, at least 20-fold, at least 50-fold, at least 100-fold, at least 200-fold, at least 500-fold, or at least 1000-fold higher than the yield of a control herpesvirus or a control cell that does not encode the second gB, the second gK, the second gH, the second UL20, or the second UL24.

[0072] In some embodiments, the gene encoding the first gB comprises a miRNA target sequence (miR-TS) cassette, wherein the miR-TS cassette comprises one or more target sequences of one or more miRNAs. In some embodiments, the gene encoding the first gK comprises a miRNA target sequence (miR-TS) cassette, wherein the miR-TS cassette comprises one or more target sequences of one or more miRNAs. In some embodiments, the gene encoding the first gH comprises a miRNA target sequence (miR-TS) cassette, wherein the miR-TS cassette comprises one or more target sequences of one or more miRNAs. In some embodiments, the gene encoding the first UL20 comprises a miRNA target sequence (miR-TS) cassette, wherein the miR-TS cassette comprises one or more target sequences of one or more miRNAs. In some embodiments, the gene encoding the first UL24 comprises a miRNA target sequence (miR-TS) cassette, wherein the miR-TS cassette comprises one or more target sequences of one or more miRNAs.

[0073] In some embodiments, the one or more miRNAs comprise at least one of miR-34c-5p, miR-299-5p, and miR-582-5p. In some embodiments, the one or more miRNAs comprise at least two of miR-34c-5p, miR-299-5p, and miR-582-5p. In some embodiments, the one or more miRNAs comprise miR-34c-5p, miR-299-5p, and miR-582-5p. In some embodiments, the miR-TS cassette comprises at least three copies, or at least four copies of the target sequences of each of the miRNA separated by a 4 bp spacer. In some embodiments, the miR-TS cassette is located at the 3′UTR of the gene. In some embodiments, the target sequence of the miRNA comprises or consists of the reverse complement of the miRNA. In some embodiments, the miR-TS cassette comprises the polynucleotide sequence of SEQ ID NO: 930. In some embodiments, the yield of the recombinant herpesvirus is at least 1-fold, at least 2-fold, at least 3-fold, at least 5-fold, at least 8-fold, at least 10-fold, at least 20-fold, at least 50-fold, at least 100-fold, at least 200-fold, at least 500-fold, or at least 1000-fold higher than the yield of a control herpesvirus or a control cell that does not comprise the miR-TS cassette.

[0074] In one aspect, the disclosure provides recombinant herpesviruses produced by culturing the cell of the disclosure and recovering the recombinant herpesvirus from the cell culture.

[0075] In one aspect, the disclosure provides recombinant herpesviruses wherein the viral genome of the herpesvirus encodes a gK comprising a syncytial mutation corresponding to 1307N of SEQ ID NO: 920.

[0076] In some embodiments, the herpesvirus is an alphaherpesvirus. In some embodiments, the alphaherpesvirus is a herpes simplex virus. In some embodiments, the herpes simplex virus is a herpes simplex virus-1 (HSV-1).

[0077] In some embodiments, the recombinant herpesvirus is oncolytic.

[0078] In some embodiments, the recombinant herpesvirus is derived from an encephalitic HSV isolate according to SEQ ID NO: 857. In some embodiments, the recombinant herpesvirus comprises a polynucleotide sequence having at least 80%, at least 85%, at least 90%, at least 95%, at least 96%, at least 97%, at least 98%, at least 99%, at least 99.5%, or 100% identity to SEQ ID NO: 857.

[0079] In some embodiments, the recombinant herpesvirus is defective for anterograde transport.

[0080] In some embodiments, the recombinant herpesvirus comprises a mutation in the UL37 viral gene. In some embodiments, the UL37 viral gene encodes a UL37 protein comprising a mutation at at least 1, at least 2, at least 3, at least 4, or all 5 amino acid positions corresponding to Q403, E452, Q455, Q511, and R515 of SEQ ID NO: 856. In some embodiments, the mutation in the UL37 viral gene comprises Q403A/E452A/Q455A/Q511A/R515A according to SEQ ID NO: 856.

[0081] In some embodiments, the recombinant herpesvirus encodes a gB comprising the mutations corresponding to A549T/D285N of SEQ ID NO: 919.

[0082] In some embodiments, the recombinant herpesvirus retains the function of ICP6, ICP34.5, and/or ICP47.

[0083] In some embodiments, the one or more transgenes are inserted in the UL50-UL51 intergenic region.

[0084] In one aspect, the disclosure provides recombinant viruses comprising one or more transgenes encoding one or more payload proteins selected from HPGD, ADA2, HYAL1, CHP, CCL21, IL-12, a CD47 antagonist, a TGFβ antagonist, a PD1 antagonist, a TREM2 antagonist, a biomolecule comprising chlorotoxin (CTX), or any combinations thereof. In some embodiments, the one or more payload proteins comprise or consist of IL-12, a PD1 antagonist, and a TREM2 antagonist. In some embodiments, the one or more payload proteins comprise HPGD. In some embodiments, the one or more payload proteins comprise a biomolecule comprising CTX. In some embodiments, the one or more payload proteins comprise or consist of one of the combinations of payload proteins listed in Tables 4-7.

[0085] In some embodiments, the one or more payload proteins comprise HPGD. In some embodiments, the one or more payload proteins comprise ADA2. In some embodiments, the one or more payload proteins comprise HYAL1. In some embodiments, the one or more payload proteins comprise CHP. In some embodiments, the one or more payload proteins comprise CCL21. In some embodiments, the one or more payload proteins comprise IL-12. In some embodiments, the one or more payload proteins comprise the CD47 antagonist. In some embodiments, the one or more payload proteins comprise the TGFβ antagonist. In some embodiments, the one or more payload proteins comprise the PD1 antagonist. In some embodiments, the one or more payload proteins comprise the TREM2 antagonist. In some embodiments, the antagonist comprises an antibody or antigen binding fragment thereof. In some embodiments, the one or more payload proteins comprise the biomolecule comprising CTX. In some embodiments, the biomolecule comprising CTX further comprises a T-cell engager moiety specifically binding to a protein expressed on the surface of the T-cell. In some embodiments, the protein expressed on the surface of the T-cell is CD3.

[0086] In one aspect, the disclosure provides recombinant viruses comprising:
[0087] (a) one or more miRNA target sequences for miR-122-5p;
[0088] (b) one or more miRNA target sequences for miR-145-5p;
[0089] (c) one or more miRNA target sequences for miR-124-3p, miR-128T, miR-137-3p, or any combination thereof;
[0090] (d) one or more miRNA target sequences for miR-34b-5p, miR-34c-5p, or any combination thereof; and
[0091] (e) one or more miRNA target sequences for miR-129-2-3p, miR-132-3p, or any combination thereof.
   In some embodiments, the recombinant virus comprises the miRNA target sequences for miR-34b-5p, miR-34c-5p, miR-122-5p, miR-124-3p, miR-128T, miR-129-2-3p, miR-132-3p, miR-137-3p, and miR-145-5p.

[0092] In one aspect, the disclosure provides recombinant viruses wherein the viral genome of the recombinant virus encodes a protein comprising a syncytial mutation and a counterpart protein without the syncytial mutation. In some embodiments, the protein comprising the syncytial mutation and the counterpart protein without the syncytial mutation share at least 90%, at least 95%, at least 96%, at least 97%, at least 98%, at least 99%, or 100% sequence identity, except the syncytial mutation. In some embodiments, the protein comprising the syncytial mutation is encoded by an endogenous viral gene and the counterpart protein without the syncytial mutation is encoded by an exogenous expression cassette. In some embodiments, the protein comprising the syncytial mutation is encoded by an exogenous expression cassette and the counterpart protein without the syncytial mutation is encoded by an endogenous viral gene. In some embodiments, both the protein comprising the syncytial mutation and the counterpart protein without the syncytial mutation are encoded by one exogenous expression cassette or by different exogenous expression cassettes.

[0093] In one aspect, the disclosure provides cells comprising a recombinant nucleic acid encoding the recombinant virus of the disclosure.

[0094] In one aspect, the disclosure provides cells comprising a first nucleic acid encoding a recombinant virus and a second nucleic acid, wherein the viral genome of the recombinant virus encodes a protein comprising a syncytial mutation, wherein the second nucleic acid encodes a a counterpart protein without the syncytial mutation. In some embodiments, the protein comprising the syncytial mutation and the counterpart protein without the syncytial mutation share at least 90%, at least 95%, at least 96%, at least 97%, at least 98%, at least 99%, or 100% sequence identity, except the syncytial mutation.

[0095] In some embodiments, the yield of the recombinant virus is at least 1-fold, at least 2-fold, at least 3-fold, at least 5-fold, at least 8-fold, at least 10-fold, at least 20-fold, at least 50-fold, at least 100-fold, at least 200-fold, at least 500-fold, or at least 1000-fold higher than the yield of a control virus or a control cell that does not encodes the counterpart protein without the syncytial mutation.

[0096] In some embodiments, the gene encoding the protein comprising the syncytial mutation comprises a miRNA target sequence (miR-TS) cassette, wherein the miR-TS cassette comprises one or more target sequences of one or more miRNAs. In some embodiments, the one or more miRNAs comprise at least one, at least two, or all of miRNAs selected from miR-34c-5p, miR-299-5p, and miR-582-5p. In some embodiments, the yield of the recombinant virus is at least 1-fold, at least 2-fold, at least 3-fold, at least 5-fold, at least 8-fold, at least 10-fold, at least 20-fold, at least 50-fold, at least 100-fold, at least 200-fold, at least 500-fold, or at least 1000-fold higher than the yield of a control virus or a control cell that does not comprise the miR-TS cassette.

[0097] In some embodiments, the recombinant virus is derived from a herpes simplex virus, an adenovirus, a polio virus, a vaccinia virus, a measles virus, a vesicular stomatitis virus, an orthomyxovirus, a parvovirus, a maraba virus, or a coxsackievirus. In some embodiments, the recombinant virus is oncolytic.

[0098] In one aspect, the disclosure provides recombinant viruses produced by culturing the cell of the disclosure and recovering the recombinant herpesvirus from the cell culture.

[0099] In one aspect, the disclosure provides nucleic acid molecules encoding the recombinant herpesvirus of the disclosure, or the recombinant virus of the disclosure. In some embodiments, the nucleic acid molecule is DNA. In some embodiments, the nucleic acid molecule is RNA.

[0100] In one aspect, the disclosure provides viral stocks comprising the recombinant herpesvirus of the disclosure, or the recombinant virus of the disclosure.

[0101] In one aspect, the disclosure provides particle comprising the nucleic acid molecule of the disclosure. In some embodiments, the particle is selected from the group consisting of a nanoparticle, an exosome, a liposome, and a lipoplex. In some embodiments, the particle is a lipid nanoparticle. In some embodiments, contacting a eukaryotic cell with the particle results in production of infectious virus particles by the eukaryotic cell.

[0102] In one aspect, the disclosure provides pharmaceutical compositions comprising:
[0103] (i) the recombinant herpesvirus of the disclosure, the recombinant virus of the disclosure, the nucleic acid molecule of the disclosure, or the particle of the disclosure; and
[0104] (ii) a pharmaceutically-acceptable carrier.

[0105] In one aspect, the disclosure provides methods of killing a cancerous cell, comprising exposing the cancerous cell to the recombinant herpesvirus of the disclosure, the recombinant virus of the disclosure, the nucleic acid molecule of the disclosure, or the particle of the disclosure, or the pharmaceutical composition of the disclosure, under conditions sufficient for the virus or particle to infect and the virus to replicate within said cancerous cell, and wherein replication of the virus within the cancerous cell results in cell death. In some embodiments, the cell is in vitro or in vivo. In some embodiments, the cancerous cell has a reduced expression of a miRNA capable of binding to the one or more miRNA target sequences compared to the expression of the miRNA in a non-cancerous cell. In some embodiments, replication of the virus is increased or maintained in the cancerous cell with a reduced expression of the miR capable of binding to the one or more miRNA target sequences. In some embodiments, the cancerous cell is a cell of lung cancer, breast cancer, ovarian cancer, cervical cancer, prostate cancer, testicular cancer, colorectal cancer, colon cancer, pancreatic cancer, liver cancer, gastric cancer, head and neck cancer, thyroid cancer, malignant glioma, glioblastoma, melanoma, non-melanoma skin cancer, B-cell chronic lymphocytic leukemia, diffuse large B-cell lymphoma (DLBCL), or marginal zone lymphoma (MZL). In some embodiments, the cancerous cell is a glioblastoma cell.

[0106] In one aspect, the disclosure provides methods of treating cancer in a subject in need thereof, comprising administering the recombinant herpesvirus of the disclosure, the recombinant virus of the disclosure, the nucleic acid molecule of the disclosure, or the particle of the disclosure, or the pharmaceutical composition of the disclosure to the subject. In some embodiments, the virus, the particle, or the composition is administered intravenously, subcutaneously, intratumorally, intramuscularly, or intranasally. In some embodiments, the virus, the particle, or the composition is administered intratumorally. In some embodiments, the virus, the particle, or the composition is administered intravenously. In some embodiments, the virus, the particle, or the composition is administered only once. In some embodiments, the cancer is selected from the group consisting of lung cancer, breast cancer, ovarian cancer, cervical cancer, prostate cancer, testicular cancer, colorectal cancer, colon cancer, pancreatic cancer, liver cancer, gastric cancer, head and neck cancer, thyroid cancer, malignant glioma, glioblastoma, melanoma, non-melanoma skin cancer, B-cell chronic lymphocytic leukemia, diffuse large B-cell lymphoma (DLBCL), and marginal zone lymphoma (MZL). In some embodiments, the cancer is glioblastoma.

[0107] In one aspect, the disclosure provides cell lines comprising the cell of the disclosure.

[0108] In one aspect, the disclosure provides methods of producing a recombinant herpesvirus, comprising culturing the cell of the disclosure, or the cell line of the disclosure, and recovering the recombinant herpesvirus from the cell culture.

[0109] In one aspect, the disclosure provides uses of the recombinant herpesvirus of the disclosure in combination with a small molecule for imaging the infection site of the herpesvirus.

[0110] In one aspect, the disclosure provides methods of imaging the infection site of an herpesvirus in vivo, comprising administering the recombinant herpesvirus of the disclosure and a small molecule.

[0111] In some embodiments, the small molecule is radioisotope labeled acyclovir. In some embodiments, the radioisotope label comprises fluorine-18 (¹⁸F) label.

### BRIEF DESCRIPTION OF THE DRAWINGS

[0112] FIG. 1 is a schematic showing the organization of a non-limiting example of a HSV backbone vector of the disclosure. CAG: CAG promoter; rBG: rabbit beta-globin polyadenylation signal; BFP: Blue fluorescent protein; DTA: diphtheria toxin subunit A.

[0113] FIG. 2A is a plot showing the expression level of each indicated miRNA in normal brain cells and glioblastoma cells. FIG. 2B is a plot showing the expression level of each indicated miRNA in ependymal cells. FIG. 2C are cell images showing (a) upper left: miR-124-3p miRNA expression level in neurons; (b) upper right: miR-124-3p miRNA expression level in oligodentrocytes; (c) lower left: Ccdc153 expression level indicating the positions of ependymal cells; (d) lower right: miR-34c-5p miRNA expression level in ependymal cells.

[0114] FIG. 3A shows exemplary designs of miR-TS cassettes in various viral genes; as well as the types of CNS cells that each corresponding miRNA is highly expressed in. FIG. 3B is a plot showing the number of plaque forming units (pfu) per mL of the HSV vector at the presence of the indicated miRNA mimic. FIG. 3C shows another exemplary design of miR-TS cassettes in various viral genes; as well as the types of CNS cells that each corresponding miRNA is highly expressed in. Each miR-T cassette incorporates 4 miR target sequences assembled in triplicate and is designed using an algorithm to minimize RNA secondary structure for maximum activity.

[0115] FIGS. 4A and 4B are plots showing the propagation of the indicated HSV vectors in Vero cells over time, as measured by PFU on the y-axis.

[0116] FIG. 5A is a plot showing the overall survival (%) of mice after intracranial injection (at day 1) of the indicated HSV vector. FIG. 5B is a plot showing the body weight change (%) of mice after intracranial injection (at day 1) of the indicated HSV vector.

[0117] FIG. 6A shows the protected cell types for each miRNA target sequence. FIG. 6B shows the miR-TS cassettes designed for the indicated HSV genes. FIG. 6C shows the configuration of miR target sequences within the indicated cassettes. FIG. 6D shows the relative expression level of luciferase under the regulatory control of the indicated miR-TS cassette at the presence of various miRNA mimics.

[0118] FIG. 7A shows virus yield of the ONCR-2169 in A431 cells at the presence of indicated miRNA mimics. FIG. 7B shows non-attenuated growth of indicated HSV virus in Vero cells.

[0119] FIG. 7C shows body weight changes of female BALB/c mice injected with the indicated HSV virus.

[0120] FIG. 8 is a schematic showing the design of the indicated HSV viral constructs. KPI: a knottin peptide that binds integrins; VE: a VHH nanobody that binds the extracellular domain of EGFR. UL23 SR39: UL23 encoding a thymidine kinase comprising L159I, 1160F, F161L, A168F and L169M combo mutations. gB N/T: UL27 encoding a glycoprotein B (gB) comprising D285N/A549T double mutations. UL30 HiFi: UL30 encoding a DNA polymerase catalytic subunit comprising L774F mutation. UL37 R2: UL37 encoding a tegument protein comprising the “R2” combo mutations (Q403A/E452A/Q455A/Q511A/R515A). The HSV construct further comprises miR-T 3060 cassette (SEQ ID NO: 858) in both ICP4 loci, miR-T 9919 cassette (SEQ ID NO: 859) in ICP8 locus, miR-T 3012 cassette (SEQ ID NO: 873) in ICP27 locus, miR-T 3096 cassette (SEQ ID NO: 874) in UL8 locus, and a mCherry-Fluc expression cassette in the UL50-UL51 intergenic region.

[0121] FIG. 9A shows the results of plaque assay of the indicated viruses on Vero cells. FIG. 9B shows the results of proliferation assays with the indicated viruses and cells.

[0122] FIG. 10 shows the results of proliferation assays with the indicated viruses in various glioblastoma cell lines.

[0123] FIG. 11 shows immunohistochemistry results of representative GBM cores.

[0124] FIG. 12 is a schematic of the ONCR-1012 viral construct.

[0125] FIG. 13 is a diagram showing the number of sequence variants over multiple passages when the indicated viruses were cultured.

[0126] FIG. 14A is an image showing the plagues generated by the infection of the indicated viruses. FIG. 14B is a diagram showing the number of plague-forming units (PFUs) per ml of the indicated viruses.

[0127] FIG. 15A is a diagram showing the relative plaque titer at different concentrations of acyclovir for the indicated viruses. FIG. 15B is a diagram showing the percentage of the remaining plaques at different concentrations of acyclovir for the indicated viruses.

[0128] FIG. 16 is a diagram showing the percentage of the remaining plaques at different concentrations of acyclovir for the indicated viruses, as well as the calculated IC50 values.

[0129] FIG. 17A is an image showing the plagues generated by the infection of the indicated viruses. FIG. 17B is a diagram showing the number of plague-forming units (PFUs) per cell for the indicated viruses.

[0130] FIG. 18A is a schematic showing the co-expression of wildtype gK from its endogenous locus and a syncytial gK mutant from a cDNA cassette. FIG. 18B is a schematic showing the co-expression of a syncytial gB mutant from its endogenous locus and a non-syncytial gB from a cDNA cassette. FIG. 18C is a schematic showing the ONCR-142 viral construct. FIG. 18D is a table showing the virus yield and syncytial phenotype of the indicated HSV constructs.

[0131] FIG. 19A is a schematic showing the miR-T2310 cassette for attenuating gene expression in Vero cells. FIG. 19B is a schematic showing the design of miR-T2310 mediated expression control of a syncytial gK mutant in a cDNA cassette. FIG. 19C is a schematic showing the design of miR-T2310 mediated expression control of a syncytial gB mutant in its endogenous locus. FIG. 19D contains schematics showing the ONCR-2112 and ONCR-2008 viral constructs, including the relative locations of the endogenous gB and gK loci as well as the cDNA expression cassette in either the UL3-UL4 or UL50-UL51 intergenic locus, respectively. FIG. 19E is a table showing the virus yield and syncytial phenotype of the indicated HSV constructs.

[0132] FIG. 20 is a chart showing the protein expression level of transgenes encoding mIL12 or anti-PD1 payload with the indicated G/C content in the ORF. The transgene(s) were inserted into the backbone of an oncolytic HSV (ONCR-GBM).

[0133] FIG. 21A is a schematic showing the HSV backbone used to express payload(s) in the screening experiments. The loxP-BAC replicon is located in the UL37-UL38 intergenic region, and the cDNA expression cassette for payload(s) is located in the UL3-UL4 intergenic region. The ICP27 locus comprises miRNA target sequences for miR-128, miR-129a, and miR-122; the ICP4 locus comprises miRNA target sequences for miR-124, miR-1, and miR-143; and the ICP34.5 locus comprises the target sequences for miR-128*, miR-204, and miR-219. The virus backbone further comprises D285N/A549T mutations in gB, eGFR inserted in gC, and a mutant US12. FIG. 21B is a table showing the payload molecule(s) for each indicated HSV. The cDNA payloads are expressed from a cassette inserted in the UL3-UL4 intergenic locus of ONCR-142, which utilizes the hybrid CAG promoter and rabbit b-Globin polyadenylation signal to control transgene expression.

[0134] FIG. 22A is a plot showing the overall survival (%) of mice after intratumoral injection of the indicated HSV vector over time in an orthotopic CT2A cell line model. FIG. 22B is a plot showing the overall survival (%) of mice after intratumoral injection of the indicated HSV vector over time in an orthotopic mNectin1-expressing GL261 cell line model. FIG. 22C is a plot showing a re-challenge study using the GL261 model. FIG. 22D is a plot showing the percentage of various immune cells in the CT2A model. FIG. 22E contains plots showing the immune cell counts after the administration of the indicated oncolytic viruses.

[0135] FIG. 23 is a plot showing the dose-response effect of the ONCR-GBM vector encoding IL12 and anti-PD1 antibody payloads in the orthotopic mNectin1-expressing GL261 cell line model, as measured by overall survival (%).

[0136] FIGS. 24A-24J. show survival plots of GL261 model mice administered with the indicated HSV combination encoding various payload molecules.

[0137] FIG. 25A is a schematic showing the HSV construct design of ONCR-2183 comprising an integrin-targeting knottin peptide in the gD. FIG. 25B shows schematics of expression cassettes for expressing payload combinations. rBG pA: Rabbit Beta Globin gene polyadenylation signal; CAG: CAG promoter; CMV: cytomegalovirus (CMV) promoter; UBC pA: Human Ubiquitin C gene polyadenylation signal; COXIV pA: Human Cytochrome Oxidase IV gene polyadenylation signal; GAPDH: human glyceraldehyde-3-phosphate dehydrogenase (GAPDH) promoter; EF1a: EF-1α promoter; EIF4A1 pA: eukaryotic initiation factor 4A-I polyA. FIG. 25C shows overall survival plots of mice in the GL261 or CT2A model administered with the indicated HSV.

[0138] FIG. 26A is a schematic showing the HSV construct design of ONCR-2204 comprising an EGFR-targeting VHH in the gD. FIG. 26B shows schematics of expression cassettes for expressing payload combinations. The corresponding cDNA payloads are indicated for each virus construct. The naming of regulatory elements follows those in FIG. 25B.

### DETAILED DESCRIPTION

[0139] The present disclosure provides recombinant viral vectors that exhibit superior properties compared to those in the prior art, including improved specificity/efficacy towards cancer cells and lower off-target infection and toxicity. The recombinant engineering of the viral vectors include:
[0140] Insertion of microRNA (miR) target sequences (miR-TS) cassettes that restrict viral vector replication to cancer cells;
[0141] Insertion of transgene encoding one or more of payload molecules (e.g., those that modulates anti-tumor immune response);
[0142] Codon optimization of genes to increase protein expression level;
[0143] Insertion of retargeting domain to allow viral infection of cancer cells expressing specific protein(s);
[0144] Introduction of syncytial mutations that increases virus fusogenicity; and/or
[0145] Introduction of mutations that improves replication fidelity and/or sensitivity to acyclovir.

[0146] Compositions of the viral vectors and methods of use in killing of cancerous cells and cancer treatment are further provided herein.

[0147] Use of oncolytic viruses carries the risk of non-specific viral infection of healthy cells, leading to the death of non-cancerous cells and tissues. However, genetic manipulation of the viruses to exploit pathways, proteins, genes, and/or miRNAs that are differentially expressed in normal vs. cancerous tissue can improve the specificity of the oncolytic viruses. Non-limiting examples of such genetic manipulation include insertion of miRNA target sequence(s) and retargeting domain.

[0148] The safety profile of the viral vectors can also be improved by additional genetic manipulation to improve the improves replication fidelity of the virus and/or the sensitivity to anti-viral drugs such as acyclovir.

[0149] The oncolytic viruses described herein can also express proteins that stimulates host immune response against tumor cells, modifying the immunosuppressive microenvironment of the tumor, and/or facilitating viral spread throughout a tumor, thereby increasing their therapeutic efficacy. In addition, the transgene may be codon optimized (e.g., raising G/C content) to increase the expression level of the proteins.

[0150] Accordingly, in some embodiments, the present disclosure provides recombinant viral vectors that can stimulate a productive and durable anti-tumor immune response against cancer (e.g., glioblastoma) in vivo following a single injection (e.g., intratumoral injection). In some embodiments, the recombinant viral vectors are engineered for efficient oncolysis of glioblastoma cells.

[0151] In some embodiments, the recombinant viral vector is a recombinant HSV vector. In some embodiments, the recombinant HSV vector is derived from an HSV isolate with proven ability to replicate in the CNS. In some embodiments, the recombinant HSV is defective for anterograde and retrograde transport in neurons. In some embodiments, the recombinant HSV retains ICP47, ICP34.5, and/or ICP6 gene functions.

[0152] Schematics of exemplary oncolytic HSVs are provided in FIG. 26A and FIG. 26B.

[0153] The section headings used herein are for organizational purposes only and are not to be construed as limiting the subject matter described. All documents, or portions of documents, cited herein, including but not limited to patents, patent applications, articles, books, and treatises, are hereby expressly incorporated by reference in their entirety for any purpose. In the event that one or more of the incorporated documents or portions of documents define a term that contradicts that term's definition in the application, the definition that appears in this application controls. However, mention of any reference, article, publication, patent, patent publication, and patent application cited herein is not, and should not be taken as an acknowledgment, or any form of suggestion, that they constitute valid prior art or form part of the common general knowledge in any country in the world.

### Definitions

[0154] In the present description, any concentration range, percentage range, ratio range, or integer range is to be understood to include the value of any integer within the recited range and, when appropriate, fractions thereof (such as one tenth and one hundredth of an integer), unless otherwise indicated. It should be understood that the terms “a” and “an” as used herein refer to “one or more” of the enumerated components unless otherwise indicated. The use of the alternative (e.g., “or”) should be understood to mean either one, both, or any combination thereof of the alternatives. As used herein, the terms “include” and “comprise” are used synonymously. As used herein, “plurality” may refer to one or more components (e.g., one or more miRNA target sequences).

[0155] As used in this application, the terms “about” and “approximately” are used as equivalents. Any numerals used in this application with or without about/approximately are meant to cover any normal fluctuations appreciated by one of ordinary skill in the relevant art. In certain embodiments, the term “approximately” or “about” refers to a range of values that fall within 10% in either direction (greater than or less than) of the stated reference value unless otherwise stated or otherwise evident from the context (except where such number would exceed 100% of a possible value).

[0156] “Decrease” or “reduce” refers to a decrease or a reduction in a particular value of at least 5%, for example, 5, 6, 7, 8, 9, 10, 15, 20, 25, 30, 35, 40, 45, 50, 55, 60, 65, 70, 75, 80, 85, 90, 95, 99 or 100% as compared to a reference value. A decrease or reduction in a particular value may also be represented as a fold-change in the value compared to a reference value, for example, at least 1, 2, 3, 4, 5, 6, 7, 8, 9, 10, 15, 20, 30, 40, 50, 60, 70, 80, 90, 100, 200, 500, 1000-fold, or more, decrease as compared to a reference value.

[0157] “Increase” refers to an increase in a particular value of at least 5%, for example, 5, 6, 7, 8, 9, 10, 15, 20, 25, 30, 35, 40, 45, 50, 55, 60, 65, 70, 75, 80, 85, 90, 95, 99, 100, 200, 300, 400, 500% or more as compared to a reference value. An increase in a particular value may also be represented as a fold-change in the value compared to a reference value, for example, at least 1-fold, 2, 3, 4, 5, 6, 7, 8, 9, 10, 15, 20, 30, 40, 50, 60, 70, 80, 90, 100, 200, 500, 1000-fold or more, increase as compared to the level of a reference value.

[0158] The term “sequence identity” refers to the percentage of bases or amino acids between two polynucleotide or polypeptide sequences that are the same, and in the same relative position. As such one polynucleotide or polypeptide sequence has a certain percentage of sequence identity compared to another polynucleotide or polypeptide sequence. For sequence comparison, typically one sequence acts as a reference sequence, to which test sequences are compared. The term “reference sequence” refers to a molecule to which a test sequence is compared.

[0159] “Complementary” refers to the capacity for pairing, through base stacking and specific hydrogen bonding, between two sequences comprising naturally or non-naturally occurring (e.g., modified as described above) bases (nucleosides) or analogs thereof. For example, if a base at one position of a nucleic acid is capable of hydrogen bonding with a base at the corresponding position of a target, then the bases are considered to be complementary to each other at that position. Nucleic acids can comprise universal bases, or inert abasic spacers that provide no positive or negative contribution to hydrogen bonding. Base pairings may include both canonical Watson-Crick base pairing and non-Watson-Crick base pairing (e.g., Wobble base pairing and Hoogsteen base pairing). It is understood that for complementary base pairings, adenosine-type bases (A) are complementary to thymidine-type bases (T) or uracil-type bases (U), that cytosine-type bases (C) are complementary to guanosine-type bases (G), and that universal bases such as such as 3-nitropyrrole or 5-nitroindole can hybridize to and are considered complementary to any A, C, U, or T. Nichols et al., Nature, 1994; 369:492-493 and Loakes et al., Nucleic Acids Res., 1994; 22:4039-4043. Inosine (I) has also been considered in the art to be a universal base and is considered complementary to any A, C, U, or T. See Watkins and SantaLucia, Nucl. Acids Research, 2005; 33 (19): 6258-6267.

[0160] “Operably linked” refers to a juxtaposition wherein the components so described are in a relationship permitting them to function in their intended manner. For instance, a promoter is operably linked to a polynucleotide sequence if the promoter affects the transcription or expression of the polynucleotide sequence.

[0161] The term “subject” includes animals, such as e.g. mammals. In some embodiments, the mammal is a primate. In some embodiments, the mammal is a human. In some embodiments, subjects are livestock such as cattle, sheep, goats, cows, swine, and the like; or domesticated animals such as dogs and cats. In some embodiments (e.g., particularly in research contexts) subjects are rodents (e.g., mice, rats, hamsters), rabbits, primates, or swine such as inbred pigs and the like. The terms “subject” and “patient” are used interchangeably herein.

[0162] The term “effective amount” refers to the amount of an agent or composition required to result in a particular physiological effect (e.g., an amount required to increase, activate, and/or enhance a particular physiological effect). The effective amount of a particular agent may be represented in a variety of ways based on the nature of the agent, such as mass/volume, # of cells/volume, particles/volume, (mass of the agent)/(mass of the subject), # of cells/(mass of subject), or particles/(mass of subject). The effective amount of a particular agent may be expressed as the half-maximal effective concentration (EC₅₀), which refers to the concentration of an agent that results in a magnitude of a particular physiological response that is half-way between a reference level and a maximum response level.

[0163] The phrase “pharmaceutically acceptable” is employed herein to refer to those compounds, materials, compositions, and/or dosage forms which are, within the scope of sound medical judgment, suitable for use in contact with the tissues of human beings and animals without excessive toxicity, irritation, allergic response, or other problem or complication, commensurate with a reasonable benefit/risk ratio.

[0164] As used herein “pharmaceutically acceptable carrier, diluent or excipient” includes without limitation any adjuvant, carrier, excipient, glidant, sweetening agent, diluent, preservative, dye/colorant, flavor enhancer, surfactant, wetting agent, dispersing agent, suspending agent, stabilizer, isotonic agent, solvent, surfactant, and/or emulsifier which has been approved by the United States Food and Drug Administration as being acceptable for use in humans and/or domestic animals.

[0165] As used herein, the term “oncolytic virus” refers to a virus that has been modified to, or naturally, preferentially infect cancer cells.

[0166] The terms “microRNA,” “miRNA,” and “miR” are used interchangeably herein and refer to small non-coding endogenous RNAs, mostly of about 21-25 nucleotides in length, that regulate gene expression by directing their target messenger RNAs (mRNA) for degradation or translational repression.

[0167] “Essential viral gene” as used herein refers to a viral gene that is required for one or more essential viral function, such as viral replication, viral packaging, or viral infectivity.

[0168] The term “vector” is used herein to refer to a nucleic acid molecule capable transferring or transporting another nucleic acid molecule. The transferred nucleic acid is generally linked to, e.g., inserted into, the vector nucleic acid molecule. A vector may include sequences that direct autonomous replication in a cell, or may include sequences sufficient to allow integration into host cell DNA.

[0169] General methods in molecular and cellular biochemistry can be found in such standard textbooks as Molecular Cloning: A Laboratory Manual, 3rd Ed. (Sambrook et al., HaRBor Laboratory Press 2001); Short Protocols in Molecular Biology, 4th Ed. (Ausubel et al. eds., John Wiley & Sons 1999); Protein Methods (Bollag et al., John Wiley & Sons 1996); Nonviral Vectors for Gene Therapy (Wagner et al. eds., Academic Press 1999); Viral Vectors (Kaplift & Loewy eds., Academic Press 1995); Immunology Methods Manual (I. Lefkovits ed., Academic Press 1997); and Cell and Tissue Culture: Laboratory Procedures in Biotechnology (Doyle & Griffiths, John Wiley & Sons 1998), the disclosures of which are incorporated herein by reference.

### Oncolytic Viruses

[0170] Examples of oncolytic viruses are known in the art including, but not limited to, herpes simplex virus (HSV), an adenovirus, a polio virus, a vaccinia virus, a measles virus, a vesicular stomatitis virus, an orthomyxovirus, a parvovirus, a maraba virus or a coxsackievirus. In some embodiments, the oncolytic virus of the disclosure is an HSV. In some embodiments, the oncolytic viruses described herein are referred to as recombinant viral vectors or oncolytic vectors.

[0171] In certain embodiments, an oncolytic virus described herein is a herpesvirus (for example, herpes simplex virus (e.g., HSV-1 or HSV-2)), an adenovirus, a polio virus, a vaccinia virus, a measles virus, a vesicular stomatitis virus, an orthomyxovirus, a parvovirus, a maraba virus or a coxsackievirus. In particular embodiments, the recombinant viral vector is an HSV capable of tumor-selective vector replication as described in International PCT Publication No. WO 2015/066042, which is incorporated by reference in its entirety.

[0172] HSV-based vectors and methods for their construction are described in, for example, U.S. Pat. Nos. 7,078,029, 6,261,552, 5,998,174, 5,879,934, 5,849,572, 5,849,571, 5,837,532, 5,804,413, and 5,658,724, and International Patent Applications WO 91/02788, WO 96/04394, WO 98/15637, and WO 99/06583, which are incorporated herein by reference in their entireties. The sequence of HSV is published (NCBI Accession No. NC_001806; see also McGoech et al., J. Gen. Virol, 69 (PT 7), 1531-1574 (1988)), which may facilitate designing HSV-based vectors of the disclosure. In some cases, the oncolytic virus of the disclosure is a herpes simplex virus (HSV) and comprises a deletion of the internal repeat (joint) region comprising one copy each of the diploid genes ICP0, ICP34.5, LAT, and ICP4 along with the promoter for the ICP47 gene. In some cases, the oncolytic virus of the disclosure is a herpes simplex virus (HSV) that retains the internal repeat (joint) region comprising one copy each of the diploid genes ICP0, ICP34.5, LAT, and ICP4 along with the promoter for the ICP47 gene.

[0173] In certain embodiments, the recombinant viral vector of the disclosure is an HSV that exhibits enhanced entry into cells, either through direct infection and/or lateral spread. In one aspect, HSV vectors of the present disclosure can directly infect cells through interaction with cell proteins other than typical mediators of HSV infection (e.g., other than Nectin-1, HVEM, or heparan sulfate/chondroitin sulfate proteoglycans). In certain embodiments, the recombinant viral vector of the disclosure is an HSV and further comprises a mutation of the gB or gH gene that facilitates vector entry through non-canonical receptors. In another aspect, the disclosure provides an HSV vector further comprising mutant gH glycoproteins that exhibit lateral spread in cells typically resistant to HSV lateral spread, such as cells lacking gD receptors. In some embodiments, an HSV vector of the disclosure comprises one or more of the mutant gB or gH proteins as described in U.S. Patent Publication No. 2013/0096186, which is incorporated herein by reference in its entirety. In certain aspects, the mutant entry protein within an HSV vector is a glycoprotein involved with viral entry, such as gB, gH, and the mutant HSV vector can comprise mutated versions of both. However, the mutant entry protein can be any protein effecting entry of the HSV vector into cells. In certain embodiments, the mutant entry protein is other than gD, although the HSV vector can additionally comprise a mutant gD, such as containing a ligand or other desired mutation. Non-limiting mutations of gB or gH glycoprotein for use in the inventive HSV vector occur at one or more of the following residues: gB: D285, gB: A549, gB: S668, gH: N753, and gH: A778. In some embodiments, the inventive HSV vector comprises mutations at both gB: D285 and gB: A549, at both gH: N753 and gH: A778, and/or at each of gB: S668, gH: N753, and gH: A778. In certain embodiments, the HSV vector contains two or more of such mutations (e.g., 3 or more, 4 or more), and the HSV vector can comprise mutations in all five of these residues. In one embodiment, an HSV vector has mutations at gB: 285, gB; 549, gH: 753, and gH: 778. The mutations are referred to herein relative to the codon (amino acid) numbering of the gD, gB, and gH genes of the HSV-1 strain KOS derivative K26GFP. The sequences for gB and gH of K26GFP differ from the sequences for gB as disclosed in GenBank (#AF311740 (incorporated herein by reference)) and for gH (GenBank #X03896 (incorporated herein by reference)) as reflected in Table 1 below.

TABLE 1
Nucleotide Changes in gB and gH Coding Sequences:

| | Amino | | | | | |
|---|---|---|---|---|---|---|
| | acid | | | Nucleotide | | |
| | position | AF311740 | K26GFP | position(s) | AF311740 | K26GFP |
| gB | 313 | T | S | 938-939 | ACG | AGC |
| | 315 | A | T | 943 | GCC | ACC |
| | 515 | H | R | 1,544 | CAC | CGC |

X03896 X03896

| | | | | | | |
|---|---|---|---|---|---|---|
| gH | 12 | I | L | 1,011 | ATT | CTT |
| | 110 | P | S | 1,305 | CCG | TCG |
| | 127 | T | I | 1,357 | ACC | ATC |
| | 138 | S | A | 1,389 | TCG | GCG |
| | 150 | A | T | 1,425 | GCC | ACC |
| | 532 | A | A | 2,573 | GCT | GCG |
| | 633 | R | R | 2,876 | CGT | CGC |

[0174] However, K26GFP may contain additional differences in the region of the gene corresponding to nucleotides 2,079-2, 102 of GenBank X03896. Thus, it will be understood that the sequence of either KOS derivative K26GFP or GenBank Accession No. AF311740 can serve as a reference sequence for the gB mutations discussed herein. Also, the sequence of either KOS derivative K26GFP or GenBank Accession No. X03896 can serve as a reference sequence for the gH mutations discussed herein. However, HSV vectors of the disclosure may include homologous mutations in gB and gH of any HSV strain.

[0175] In some aspects, the mutation of the entry protein for inclusion in an HSV vector is a substitution mutation; however, mutations are not limited to substitution mutants. In certain embodiments, mutant gB or gH glycoproteins for use in an HSV vector are selected from the group of substitution mutations consisting of gB: D285N, gB: A549T, gB: S668N, gH: N753K, gH: A778V. In certain aspects, an HSV vector includes combinations of these substitutions (such as two or more of such substitutions (e.g., 3 or more, 4 or more, or all)), with the gB: D285N/gB: A549T double mutant, the gH: N753K/gH: A778V double mutant, and the gB: S668N/gH: N753K/gH: A778V triple mutant being examples of embodiments. In one embodiment, an HSV vector comprises gB: D285N/gB: A549T/gH: N753K/gH: A778V.

[0176] In certain aspects, an HSV vector comprises a mutant gB and/or a mutant gH glycoprotein, wherein the mutations in the glycoproteins are substitution mutations in at least two residues, wherein, when the vector is HSV-1 K26GFP, the at least two residues are selected from the group consisting of gB: D285, gB: A549, gB: S668, gH: N753, and gH: A778, or wherein when the vector is a homologous HSV, the at least two residues are selected from amino acids that correlate to gB: D285, gB: A549, gB: S668, gH: N753, and gH: A778 wherein the gB: D285 residue correlates to X in VYPYXEFVL (SEQ ID NO: 838), the gB: A549 residue correlates to X in KLNPNXIAS (SEQ ID NO: 839), the gB: S668 residue correlates to X in ITTVXTFID (SEQ ID NO: 840) the gH: N753 residue correlates to X in VDTDXTQQQ (SEQ ID NO: 841), and the gH: A778 residue correlates to X in VPSTXLLLF (SEQ ID NO: 842); and wherein the HSV vector is an HSV-1 or HSV-2 vector.

[0177] In some embodiments, the oncolytic HSV viruses described herein comprise one or more mutations in the UL37 gene that reduce HSV infection of neuronal cells, such as those described in International PCT Publication No. WO 2016/141320 and Richard et al., Plos Pathogens, 2017, 13 (12), e1006741.

[0178] In some embodiments, the HSV of the disclosure comprises a mutation in the UL37 viral gene, which encodes UL37 inner tegument protein with deamidase activity. The functions of UL37 protein may include: modulation of cytoplasmic secondary envelopment during viral egress; interaction with the capsid via the large tegument protein/LTP for its transportation to the host trans-Golgi network (TGN) where secondary envelopment occurs; modulation of tegumentation and capsid accumulation at the viral assembly complex; deamidation of host DDX58/RIG-I to suppress its function to sense viral dsRNA; and/or deamidation of host cGAS which abolishes cGAMP synthesis and downstream innate immune activation.

[0179] In some embodiments, the UL37 viral gene encodes a UL37 protein having at least 70%, at least 75%, at least 80%, at least 85%, at least 90%, at least 95%, at least 97%, at least 98%, at least 99%, or 100% identity to SEQ ID NO: 856.

[0180] In some embodiments, the UL37 viral gene encodes a UL37 protein comprising a mutation at 1, 2, 3, 4, or 5 of the amino acid positions corresponding to Q403, E452, Q455, Q511, and R515 of SEQ ID NO: 856. In some embodiments, the mutation is alanine substitution. In some embodiments, the UL37 viral gene encodes a UL37 protein comprising a mutation at all of of the amino acid positions corresponding to Q403, E452, Q455, Q511, and R515 of SEQ ID NO: 856. In some embodiments, the UL37 viral gene encodes a UL37 protein comprising the mutation Q403A/E452A/Q455A/Q511A/R515A according to SEQ ID NO: 856.

[0181] In some embodiments, the recombinant HSV is derived from an encephalitic HSV isolate according to SEQ ID NO: 857 (the complete genome sequence of HSV Strain MacIntyre; GenBank Accession Number MN136523.1; American Type Culture Collection (ATCC) Catalog Number VR-39). In some embodiments, the recombinant HSV comprises a polynucleotide sequence having at least 80%, at least 85%, at least 90%, at least 95%, at least 96%, at least 97%, at least 98%, at least 99%, at least 99.5%, or 100% identity to SEQ ID NO: 857 except for the mutation(s) (substitution, insertion and/or deletion) that are explicitly engineered into the recombinant HSV according to the present disclosure.

[0182] In some embodiments, the recombinant HSV is defective for anterograde transport.

[0183] In some embodiments, the recombinant HSV retains the function of ICP6, ICP34.5, ICP47, or any combination thereof. In some embodiments, the recombinant HSV retains the function of ICP6. In some embodiments, the recombinant HSV retains the function of ICP34.5. In some embodiments, the recombinant HSV retains the function of ICP47. In some embodiments, the recombinant HSV retains the function of the ICP6, ICP34.5, and ICP47 genes.

[0184] In some embodiments, the recombinant HSV comprises a bacterial artificial chromosome sequence inserted in the UL40-UL41 intergenic region. In some embodiments, the recombinant HSV comprises a bacterial artificial chromosome sequence inserted in the UL37-UL38 intergenic region.

[0185] In some embodiments, the recombinant virus comprises an exogenous expression cassette (e.g., payload molecule expression cassette) inserted in the UL50-UL51 intergenic region. In some embodiments, the recombinant virus comprises an exogenous expression cassette (e.g., payload molecule expression cassette) inserted in the UL3-UL4 intergenic region. In some embodiments, the recombinant virus comprises an exogenous expression cassette (e.g., payload molecule expression cassette) inserted in the UL40-UL41 intergenic region. In some embodiments, the recombinant virus comprises an exogenous expression cassette (e.g., payload molecule expression cassette) inserted in the UL37-UL38 intergenic region.

miRNA-Attenuated Oncolytic Viruses

[0186] MicroRNAs (miRNAs or miRs) are small non-coding endogenous RNAs that regulate gene expression by directing their target messenger RNAs for degradation or translational repression. miRs are intimately associated with normal cellular processes and therefore, deregulation of miRNAs contributes to a wide array of diseases including cancer. Many miR genes are located in cancer associated genomic regions, or in fragile sites, further strengthening the evidence that miRs play a pivotal role in cancer. miRs are differentially expressed in cancer tissues compared to normal tissues and can have a causative relationship to tumorigenesis. By exploiting this differential miR expression in diverse tumor types, the cancer therapeutics described herein possess a broad-spectrum safety and efficacy profile, wherein oncolytic viral replication is regulated based on the expression of a particular miR or group of miRs.

[0187] In some aspects, the present disclosure utilizes differential miR expression profiles to effectively restrict viral vector replication to tumor cells by incorporating miR target sequences into one or more genes required for viral replication. In some embodiments, the viral vectors described herein comprise two, three, four or more copies of a miR target sequence incorporated into one or more viral genes.

[0188] In particular, the present disclosure recognizes that miR-attenuation strategies that protect multiple cell types of the central nervous system from viral lysis enhances the therapeutic efficacy of an oncolytic virus in the treatment of glioblastoma. This is exemplified in the present disclosure by strategies to protect neurons, ependymal cells, oligodendrocytes, astrocytes, hepatocytes and/or endothelial cells from viral lysis while permitting viral replication and lysis in tumor cells. Therefore, in some embodiments, the recombinant viral vector is engineered for safety using a miR attenuation strategy to limit viral replication in the normal CNS cells (e.g., neuron, ependymal cells, oligodendrocytes, astrocytes).

[0189] In some embodiments, the present disclosure provides oncolytic viruses, wherein one or more copies of one or more micro-RNA (miRNA) target sequences are inserted into a locus of one or more viral genes. In some embodiments, the one or more viral genes are essential viral genes required for viral replication. In some embodiments, the insertion of the miRNA target sequences can limit viral replication in the normal cells of the central nervous system (CNS), thus provide an enhanced safety profile.

[0190] miRs are differentially expressed in a broad array of disease states, including multiple types of cancer. Importantly, miRNAs are differentially expressed in cancer tissues compared to normal tissues, enabling them to serve as a targeting mechanism in a broad variety of cancers. miRNAs that are associated (either positively or negatively) with carcinogenesis, malignant transformation, or metastasis are known as “oncomiRs”.

[0191] In some aspects, the expression level of a particular oncomiR is positively associated with the development or maintenance of a particular cancer. Such miRs are referred to herein as “oncogenic miRs.” In some embodiments, the expression of an oncogenic miR is increased in cancerous cells or tissues compared to the expression level observed in non-cancerous controls cells (i.e., normal or healthy controls) or is increased compared to the expression level observed in cancerous cells derived from a different cancer type. In some embodiments, the expression of an oncogenic miR is increased by at least 5%, 10%, 15%, 20%, 25%, 30%, 35%, 40%, 45%, 50%, 60%, 70%, 80%, 90%, 100%, 150%, 200%, 300%, 400%, 500%, 1000% or more compared to the expression of the oncogenic miR in a non-cancerous control cell or a cancerous cell derived from a different cancer type. In some aspects, a cancerous cell or tissue may express an oncogenic miR that is not expressed in non-cancerous control cells or tissues. Examples of oncogenic miRNAs that are frequently over-expressed in cancer tissues include, but are not limited to, miR-21, miR-155 and miR-17-92. Additional examples of oncogenic miRs are listed in Table 13.

[0192] In some embodiments, the expression of a particular oncomiR is negatively associated with the development or maintenance of a particular cancer and/or metastasis. Such oncomiRs are referred to herein as “tumor-suppressor miRs” or “tumor-suppressive miRs,” as their expression prevents or suppresses the development of cancer. In some embodiments, the expression of a tumor-suppressor miRNA is decreased in cancerous cells or tissues compared to the expression level observed in non-cancerous control cells (i.e., normal or healthy controls), or is decreased compared to the expression level of the tumor-suppressor miRNA observed in cancerous cells derived from a different cancer type. For example, the expression of a tumor-suppressor miRNA in a cancerous cell may be decreased by at least 5%, 10%, 15%, 20%, 25%, 30%, 35%, 40%, 45%, 50%, 60%, 70%, 80%, 90%, or 100% compared to the expression of the tumor-suppressor miRNA in a non-cancerous control cell or a cancerous cell derived from a different cancer type. In some aspects, a non-cancerous control cell may express a tumor-suppressor miRNA that is not expressed in cancerous cells. Examples of tumor-suppressive miRNAs include, but are not limited to, miR-122, miR-184, miR-34a, let7a, miR-145-5p, miR-199a-5p, miR-451a, miR-125a, miR-125a-5p, miR-126-3p, miR-233-3p, miR-143-3p, miR-1-3p, miR-133a-3p, miR-127a-3p, miR-133b, miR-134-3p, miR-124, miR-101, miR-125b, miR-145, miR-559, miR-213, miR-31-5p, miR-205p, miR-15a, miR-16-1, miR-34, as well as miRNAs of the let-7 family. Additional examples of tumor-suppressive miRs are listed in Table 12 and Table 14.

[0193] Cancer pathogenesis is a heterogeneous and multigenic process. As such, activation of particular pathways and the expression of particular genes may lead to cancer development in one context, and result in distinct or opposing results when activated or expressed in a different context. Therefore, the characterization of a particular gene or miR as an “oncogene” or “oncogenic miR” or as a “tumor-suppressor” or “tumor-suppressive miR” is not a binary distinction and will vary according to the type of cancer. For example, the expression of one miRNA may be increased in a particular cancer and associated with the development of that cancer, while the expression of the same miRNA may be decreased in a different cancer and associated with prevention of the development of that cancer. However, some miRNAs may function as oncogenic miRNAs independent of the type of cancer. For example, some miRNAs target mRNA transcripts of tumor suppressor genes for degradation, thereby reducing expression of the tumor suppressor protein. For example, miR-152b functions as an oncogenic miR in the vast majority of hematologic malignancies, but functions as a tumor-suppressive miR in many solid tumors. Further, a particular miR may be highly expressed in both cancerous and non-cancerous cells. For example, miR-155 is highly expressed in normal cells, playing an essential role in macrophage polarization, and is also highly expressed in cancer cells. As such, the development of the miR-attenuated, genome-editing, and microenvironment-remodeling oncolytic viruses described herein is based on the differential expression of a particular miR or group of miRs in one cell population or tissue compared to another cell population or tissue. One of skill in the art will understand that the term tumor-suppressive miR generally refers to a miR that is more highly expressed in a non-cancerous cell or tissue compared to a cancerous cell or tissue, and that the term oncogenic miR generally refers to a miR that is more highly expressed in a cancerous cell or tissue compared to a non-cancerous cell or tissue. One of skill in the art will further understand that a miR characterized as a tumor-suppressive miR in one type of cancer may or more may not function as a tumor-suppressive miR in a different type of cancer, and that a miR characterized as an oncogenic miR in one type of cancer may or more may not function as an oncogenic miR in a different type of cancer.

[0194] Table 10 shows the relationship between 12 select oncomiRs (9 tumor suppressors and 3 oncogenic miRNAs) and numerous cancers. A list of 3,410 oncomiR-cancer relationships is shown in Table 11. miRNAs regulate many transcripts of proteins that are involved in the control of cellular proliferation and apoptosis. Regulated proteins include conventional proto-oncoproteins and tumor suppressors such as Ras, Myc, Bcl2, PTEN and p53. Aberrant expression of miRNAs therefore often is involved in development of cancer and can therapeutically be corrected by either inhibiting oncogenic miRNAs or replacing the depleted tumor suppressor miRNA. Further, the differential expression of particular oncomiRs in cancerous vs. non-cancerous cells can be exploited as a means to target cancer therapeutics specifically to cancer cells. As such, in some embodiments, the oncolytic viral vectors described herein can comprise insertion of miRNA target sequences into the viral genome, thereby restricting viral vector replication to cancer or tumor cells, and/or one or more polynucleotides incorporated into the viral genome whose product(s) disrupt the function of an oncogenic miRNA.

[0195] One aspect of the disclosure comprises a recombinant oncolytic virus (or viral vector) comprising a plurality of copies of one or more miRNA target sequences inserted into a locus of one or more essential viral genes. In certain embodiments, a recombinant oncolytic virus may comprise miRNA target sequences inserted into a locus of at least one, at least two, at least three, at least four, at least five, at least six, at least seven, at least eight, at least nine, or at least ten essential viral genes. miRNAs expressed in normal (non-cancerous) cells can bind to such target sequences and suppress expression of the viral gene containing the miRNA target sequence, thereby limiting viral replication in healthy, non-cancerous cells. Such recombinant oncolytic viruses are referred to herein as “miR-attenuated” or “replication-restricted” as they demonstrate reduced or attenuated viral replication in cells that express one or more miRNAs capable of binding to the incorporated miR target sequences compared to cells that do not express, or have reduced expression of, the miR. By incorporating miRNA target sequences into key genes required for viral replication, viral replication can be conditionally suppressed in normal diploid cells expressing the miRNAs and can proceed normally in cells that do not express the miRNAs. In such embodiments, normal, non-cancerous cells are protected from lytic effects of infection by the recombinant viral vector.

[0196] In certain embodiments, the one or more miRNA target sequences is incorporated into the 5′ untranslated region (UTR) and/or 3′ UTR of one or more essential viral genes. In some embodiments, the oncolytic virus is a herpes simplex virus (HSV), and the viral genes required for viral replication include any of UL1, UL5, UL6, UL7, UL8, UL9, UL11, UL12, UL14, UL15, UL17, UL18, UL19, UL20, UL22, UL25, UL26, UL26.5, UL27, UL28, UL29, UL30, UL31, UL32, UL33, UL34, UL35, UL36, UL37, UL38, UL39, UL40, UL42, UL48, UL49, UL52, UL53, UL54, ICP0, ICP4, ICP22, ICP27, ICP34.5, ICP47, gamma-34.5, US3, US4, US5, US6, US7, US8, US9, US10, US11, and/or US12. In certain embodiments, the oncolytic virus is HSV and comprises one or more miRNA target sequences incorporated into the 5′ or 3′ UTR of one or more essential viral genes. In some embodiments, the oncolytic virus is HSV, and the one or more miRNA target sequences is incorporated into one or more of ICP4, ICP27, UL8, UL42, UL19, and ICP34.5. In some embodiments, the oncolytic virus is HSV, and the one or more miRNA target sequences is incorporated into the 5′ or 3′ UTR of one or more of ICP4, ICP27, UL8, UL42, UL19, and ICP34.5. In some embodiments, the oncolytic virus is HSV, and the one or more miRNA target sequences is incorporated into the 5′ or 3′ UTR of one or more of ICP4, ICP8, ICP27, and UL8.

miRNA Target Sequence Cassettes

[0197] In animals, genes for miRNAs are transcribed to a primary miRNA (pri-miRNA), which is then processed in the nucleus by Drosha, a class 2 RNase III enzyme, to form a precursor miRNA (pre-miRNA) hairpin. The pre-miRNA hairpins are transported to the cytoplasm, where they are cleaved by the RNase III enzyme Dicer. This endoribonuclease interacts with 5′ and 3′ ends of the hairpin and cuts away the loop joining the 3′ and 5′ arms, yielding a duplex RNA molecule about 22 nucleotides in length. Although either strand of the duplex may potentially act as a functional miRNA, typically one strand of the miRNA is degraded and only one strand is loaded onto the Argonaute (Ago) protein to produce the effector RNA-induced silencing complex (RISC) where the miRNA and its mRNA target interact (Wahid et al., 1803:11, 2010, 1231-1243).

[0198] Herein, the gene encoding a particular miRNA is referenced as “MIR” followed by the miRNA number. The intermediate hairpin pre-miRNA molecules are referenced as “mir-” followed by the miRNA number, while the mature single-stranded miRNA molecule is referenced as “miR-” followed by the miRNA number. For example, “MIR122” refers to the gene encoding a hairpin mir-122 pre-miRNA molecule, which is then processed into a mature miR-122 molecule. Due to the hairpin structure of the pre-miRNA, it is possible that two mature microRNAs can originate from opposite arms of the same pre-miRNA. In some instances, expression data clearly identify one strand as the predominantly expressed miRNA and the other as the minor product. In such instances, the mature miRNA sequences are assigned names of the form miR-##(the predominant product) and miR-##* (minor product from the opposite arm of the precursor). For example, the major and minor products of mir-56 are denoted as miR-56 and miR-56*, respectively. When the existing data are not sufficient to determine which sequence is the predominant one, or when they are found in roughly similar amounts, the two mature miRNA products are denoted as miR-##-5p (from the 5′ arm of the pre-miRNA hairpin) and miR-##-3p (from the 3′ arm of the pre-miRNA hairpin). For example, the two mature miRNA products of mir-142 are denoted as miR-142-5p and miR-142-3p. Because they originate from opposite ends of the pre-miRNA hairpin, the −3p and −5p products of a particular miRNA will comprise different RNA sequences and will therefore recognize different target sequences.

[0199] Herein, miRNA target sequences are inserted into the locus of one or more essential viral genes in the form of a “miR target sequence cassette” or “miR-TS cassette.” A miR-TS cassette which refers to a polynucleotide sequence comprising one or more miRNA target sequences and capable of being inserted into a specific locus of a viral gene. When transcribed, the mRNA transcripts of a viral gene comprising a miR-TS cassette will comprise one or more miRNA target sequences. In some embodiments, the miR-TS cassettes described herein comprise at least one miRNA target sequence. In some embodiments, the miR-TS cassettes described herein comprise a plurality of miRNA target sequences. For example, in some embodiments, the miR-TS cassettes described herein comprise 2, 3, 4, 5, 6, 7, 8, 9, 10, 11, 12, 13, 14, 15, 16, 17, 18, 19, 20, or more miRNA target sequences. In some embodiments, the miR-TS cassettes described herein comprise miRNA target sequences for at least 4 miRNAs. In some embodiments, the miR-TS cassettes described herein comprise miRNA target sequences for 4 miRNAs.

[0200] In some embodiments, wherein the miR-TS cassettes comprise two or more miRNA target sequences, the two or more target sequences are arranged such that the total length of the miR-TS cassette (m) is less than or equal to the average length of the miRNA target sequences (n) multiplied by the total number of miRNA target sequences in the cassette (γ) plus the average length of a linker sequence (l) multiplied by the total number of miRNA target sequences in the cassette plus 1 (y+1). Thus, the length of a miR-TS cassette (m) can be represented by the formula: m≤(n*y)+ (l*(y+1)), wherein n=the average length of the miRNA target sequences, l=the average length of the linker sequences, and y=the total number of target sequences in the miR-TS cassette). As an illustrative example, if a miR-TS cassettes comprises 4 miRNA target sequences (y) with an average length of 21 nt (n), and the average length of the linker sequences is between 4 and 25 nt (l), the length of the miR-TS cassette (m) is between about 104 nt and about 205 nt.

[0201] As used herein, the “length” of a miR-TS cassette is defined as the total number of nucleotides (basepairs for double-stranded polynucleotides) from the 5′ nucleotide of the first miR-TS to the 3′ nucleotide of the last miR-TS in the polynucleotide, inclusive of any intervening sequences. For non-overlapping miR-TSs, the minimum length of a miR-TS cassette will be the sum of the lengths of the miR-TSs. Spacers increase the length. The choice of spacer length determines the number of additional nucleotides in the cassette. Longer spacers increase the length of the cassette more than shorter spacers. By recognizing that shorter spacers (as short as 0, 1, 2, 3, 4, 5, or 6 nt) can be used when miR-TSs are interleaved (minimizing the number of mi-TSs for the same miRNA that are adjacent to one another)—the interleaved miR-TSs serving to increase the space between the other miR-TSs—the present inventors have determined that it is possible to generate shorter miR-TS cassettes than is possible in miR-TS cassettes in which miR-TSs for the same miRNA are arrayed in tandem, e.g. four of one type followed by four of the next type. In some embodiments, the length of the miR-TS cassette is less than 1000 nt. In some embodiments, the length of the miR-TS cassette is less than 900 nt, less than 800 nt, less than 700 nt, less than 600 nt, less than 500 nt, less than 400 nt, less than 300 nt, less than 200 nt, less than 100 nt, or less than 50 nt. In some embodiments, the length of the miR-TS cassette is less than 400 nt, less than 390 nt, less than 380 nt, less than 370 nt, less than 360 nt, less than 350 nt, less than 340 nt, less than 330 nt, or less than 320 nt. In some embodiments, the length of the miR-TS cassette is less than 320 nt.

[0202] In some embodiments, the length of the miR-TS cassette is less than 26, 27, 28, 29, or 30 nt times the number of miR-TS sites, less than about 30 nt times the number of miR-TS sites, less than about 35 nt times the number of miR-TS sites, or less than about 40 nt times the number of miR-TS sites.

[0203] In some embodiments, the miR-TS cassettes comprise a plurality of miRNA target sequences, wherein each miRNA target sequence in the plurality is a target sequence for the same miRNA. For example, the miR-TS cassettes may comprise 2, 3, 4, 5, 6, 7, 8, 9, 10 or more copies of the same miR target sequence. In some embodiments, the miR-TS cassettes comprise between 2 to 6 copies of the same miR target sequence. In some embodiments, the miR-TS cassettes comprise 4 copies of the same miR target sequence. In some embodiments, the miR-TS cassettes comprise 3 copies of the same miR target sequence.

[0204] In some embodiments, the miR-TS cassettes described herein comprise a plurality of miRNA target sequences, wherein the plurality comprises at least two different miRNA target sequences. In some embodiments, the miR-TS cassettes described herein comprise 2, 3, 4, 5, 6, 7, 8, 9, or 10 different miRNA target sequences. For example, in some embodiments, the miR-TS cassette may one or more copies of a first miRNA target sequence and one or more copies of a second miRNA target sequence. In some embodiments, the miR-TS cassette comprises at least 2, 3, 4, 5, 6, 7, 8, 9, 10, or more copies of a first miR target sequence and at least 2, 3, 4, 5, 6, 7, 8, 9, 10, or more copies of a second miR target sequence. In some embodiments, the miR-TS cassette comprises 3 or 4 copies of a first miR target sequence and 3 or 4 copies of a second miR target sequence. In some embodiments, the plurality of miRNA target sequences comprises at least 3 different miRNA target sequences. For example, in some embodiments, the miR-TS cassette comprises one or more copies of a first miR target sequence, one or more copies of a second miR target sequence, and one or more copies of a third miR target sequence. In some embodiments, the miR-TS cassette comprises at least 2, 3, 4, 5, 6, 7, 8, 9, 10, or more copies of a first miR target sequence, at least 2, 3, 4, 5, 6, 7, 8, 9, 10, or more copies of a second miR target sequence, and at least 2, 3, 4, 5, 6, 7, 8, 9, 10, or more copies of a third miR target sequence. In some embodiments, the miR-TS cassette comprises 3 or 4 copies of a first miR target sequence, 3 or 4 copies of a second miR target sequence, and 3 or 4 copies of a third miR target sequence. In some embodiments, the plurality of miRNA target sequences comprises at least 4 different miRNA target sequences. For example, in some embodiments, the miR-TS cassette comprises one or more copies of a first miR target sequence, one or more copies of a second miR target sequence, one or more copies of a third miR target sequence, and one or more copies of a fourth miR target sequence. In some embodiments, the miR-TS cassette comprises at least 2, 3, 4, 5, 6, 7, 8, 9, 10, or more copies of a first miR target sequence, at least 2, 3, 4, 5, 6, 7, 8, 9, 10, or more copies of a second miR target sequence, at least 2, 3, 4, 5, 6, 7, 8, 9, 10, or more copies of a third miR target sequence, and at least 2, 3, 4, 5, 6, 7, 8, 9, 10, or more copies of a fourth miR target sequence. In some embodiments, the miR-TS cassette comprises 3 or 4 copies of a first miR target sequence, 3 or 4 copies of a second miR target sequence, 3 or 4 copies of a third miR target sequence, and 3 or 4 copies of a fourth miR target sequence. In some embodiments, the miR-TS cassette comprises 3 copies of a first miR target sequence, 3 copies of a second miR target sequence, 3 copies of a third miR target sequence, and 3 copies of a fourth miR target sequence.

[0205] In some aspects, wherein the miR-TS cassettes comprise a plurality of miRNA target sequences, the plurality of miRNA target sequences may arranged in tandem, without any intervening nucleic acid sequences. In some aspects, the plurality of miRNA target sequences may be separated by a linker sequence. In some embodiments, the linker sequence comprises 2, 3, 4, 5, 6, 7, 8, 9, 10, 15, 20, 25, or more nucleotides. In some embodiments, the linker sequence comprises about 4 to about 20 nucleotides. In some embodiments, the linker sequence comprises about 4 to about 16 nucleotides. In some embodiments, the linker sequence comprises 4 nucleotides. As an illustrative embodiment, a miR-TS cassette may comprise 1, 2, 3, 4, 5, 6, 7, 8, 9, 10, or more of the following subunits: (a) a first miRNA target sequence—linker—a second miRNA target sequence, wherein adjacent subunits are separated by an additional linker sequence. In some embodiments, the first and the second miRNA target sequence are targets of the same miRNA. In some embodiments, the first and the second miRNA target sequence are targets of different miRNAs.

[0206] In some embodiments, miR-TS cassettes described herein comprise a miRNA target sequence that is at most 4, at most 3, at most 2, or at most 1 nucleotide(s) different from the reverse complement of a sequence selected from SEQ ID NOs: 1-803 and 861-866. In some embodiments, miR-TS cassettes described herein comprise a miRNA target sequence that comprises or consists of the reverse complement of a sequence selected from SEQ ID NOs: 1-803 and 861-866.

[0207] In some embodiments, miR-TS cassettes described herein comprise a miRNA target sequence that comprises or consists of any one of SEQ ID NOs: 804-837 and 867-872.

[0208] In some embodiments, the miR-TS cassettes described herein comprise at least 1, at least 2, at least 3, or at least 4 miR-122-5p target sequences. In some embodiments, the miR-122-5p target sequences are at most 4, at most 3, at most 2, or at most 1 nucleotide(s) different from SEQ ID NO: 804. In some embodiments, the miR-122-5p target sequences comprise or consist of SEQ ID NO: 804. In some embodiments, the virus described herein comprises one or more miR-122-5p target sequences in ICP4.

[0209] In some embodiments, the miR-TS cassettes described herein comprise at least 1, at least 2, at least 3, or at least 4 miR-124-3p target sequences. In some embodiments, the miR-124-3p target sequences are at most 4, at most 3, at most 2, or at most 1 nucleotide(s) different from SEQ ID NO: 805. In some embodiments, the miR-124-3p target sequences comprise or consist of SEQ ID NO: 805. In some embodiments, the virus described herein comprises one or more miR-124-3p target sequences in ICP4. In some embodiments, the virus described herein comprises one or more miR-124-3p target sequences in ICP8. In some embodiments, the virus described herein comprises one or more miR-124-3p target sequences in ICP27. In some embodiments, the virus described herein comprises one or more miR-124-3p target sequences in both ICP4 and ICP8. In some embodiments, the virus described herein comprises one or more miR-124-3p target sequences in both ICP8 and ICP27. In some embodiments, the virus described herein comprises one or more miR-124-3p target sequences in both ICP4 and ICP27. In some embodiments, the virus described herein comprises one or more miR-124-3p target sequences in ICP4, ICP8, and ICP27.

[0210] In some embodiments, the miR-TS cassettes described herein comprise at least 1, at least 2, at least 3, or at least 4 miR-125a-5p target sequences. In some embodiments, the miR-125a-5p target sequences are at most 4, at most 3, at most 2, or at most 1 nucleotide(s) different from SEQ ID NO: 806. In some embodiments, the miR-125a-5p target sequences comprise or consist of SEQ ID NO: 806.

[0211] In some embodiments, the miR-TS cassettes described herein comprise at least 1, at least 2, at least 3, or at least 4 miR-126-3p target sequences. In some embodiments, the miR-126-3p target sequences are at most 4, at most 3, at most 2, or at most 1 nucleotide(s) different from SEQ ID NO: 807 or SEQ ID NO: 808. In some embodiments, the miR-126-3p target sequences comprise or consist of SEQ ID NO: 807 or SEQ ID NO: 808.

[0212] In some embodiments, the miR-TS cassettes described herein comprise at least 1, at least 2, at least 3, or at least 4 miR-127a-3p target sequences. In some embodiments, the miR-127a-3p target sequences are at most 4, at most 3, at most 2, or at most 1 nucleotide(s) different from SEQ ID NO: 809. In some embodiments, the miR-127a-3p target sequences comprise or consist of SEQ ID NO: 809.

[0213] In some embodiments, the miR-TS cassettes described herein comprise at least 1, at least 2, at least 3, or at least 4 miR-128-3p target sequences. In some embodiments, the miR-128-3p target sequences are at most 4, at most 3, at most 2, or at most 1 nucleotide(s) different from SEQ ID NO: 810 or SEQ ID NO: 811. In some embodiments, the miR-128-3p target sequences comprise or consist of SEQ ID NO: 810 or SEQ ID NO: 811.

[0214] In some embodiments, the miR-TS cassettes described herein comprise at least 1, at least 2, at least 3, or at least 4 miR-129-3p target sequences. In some embodiments, the miR-129-3p target sequences are at most 4, at most 3, at most 2, or at most 1 nucleotide(s) different from SEQ ID NO: 812. In some embodiments, the miR-129-3p target sequences comprise or consist of SEQ ID NO: 812.

[0215] In some embodiments, the miR-TS cassettes described herein comprise at least 1, at least 2, at least 3, or at least 4 miR-129-5p target sequences. In some embodiments, the miR-129-5p target sequences are at most 4, at most 3, at most 2, or at most 1 nucleotide(s) different from SEQ ID NO: 813. In some embodiments, the miR-129-5p target sequences comprise or consist of SEQ ID NO: 813.

[0216] In some embodiments, the miR-TS cassettes described herein comprise at least 1, at least 2, at least 3, or at least 4 miR-130b-3p target sequences. In some embodiments, the miR-130b-3p target sequences are at most 4, at most 3, at most 2, or at most 1 nucleotide(s) different from SEQ ID NO: 814. In some embodiments, the miR-130b-3p target sequences comprise or consist of SEQ ID NO: 814.

[0217] In some embodiments, the miR-TS cassettes described herein comprise at least 1, at least 2, at least 3, or at least 4 miR-130b-5p target sequences. In some embodiments, the miR-130b-5p target sequences are at most 4, at most 3, at most 2, or at most 1 nucleotide(s) different from SEQ ID NO: 815. In some embodiments, the miR-130b-5p target sequences comprise or consist of SEQ ID NO: 815.

[0218] In some embodiments, the miR-TS cassettes described herein comprise at least 1, at least 2, at least 3, or at least 4 miR-133a-3p target sequences. In some embodiments, the miR-133a-3p target sequences are at most 4, at most 3, at most 2, or at most 1 nucleotide(s) different from SEQ ID NO: 816. In some embodiments, the miR-133a-3p target sequences comprise or consist of SEQ ID NO: 816.

[0219] In some embodiments, the miR-TS cassettes described herein comprise at least 1, at least 2, at least 3, or at least 4 miR-133b-3p target sequences. In some embodiments, the miR-133b-3p target sequences are at most 4, at most 3, at most 2, or at most 1 nucleotide(s) different from SEQ ID NO: 817. In some embodiments, the miR-133b-3p target sequences comprise or consist of SEQ ID NO: 817.

[0220] In some embodiments, the miR-TS cassettes described herein comprise at least 1, at least 2, at least 3, or at least 4 miR-134-3p target sequences. In some embodiments, the miR-134-3p target sequences are at most 4, at most 3, at most 2, or at most 1 nucleotide(s) different from SEQ ID NO: 818. In some embodiments, the miR-134-3p target sequences comprise or consist of SEQ ID NO: 818.

[0221] In some embodiments, the miR-TS cassettes described herein comprise at least 1, at least 2, at least 3, or at least 4 miR-137-3p target sequences. In some embodiments, the miR-137-3p target sequences are at most 4, at most 3, at most 2, or at most 1 nucleotide(s) different from SEQ ID NO: 819. In some embodiments, the miR-137-3p target sequences comprise or consist of SEQ ID NO: 819. In some embodiments, the virus described herein comprises one or more miR-137-3p target sequences in ICP4. In some embodiments, the virus described herein comprises one or more miR-137-3p target sequences in ICP27. In some embodiments, the virus described herein comprises one or more miR-137-3p target sequences in ICP4 and ICP27.

[0222] In some embodiments, the miR-TS cassettes described herein comprise at least 1, at least 2, at least 3, or at least 4 miR-1-3p target sequences. In some embodiments, the miR-1-3p target sequences are at most 4, at most 3, at most 2, or at most 1 nucleotide(s) different from SEQ ID NO: 820. In some embodiments, the miR-1-3p target sequences comprise or consist of SEQ ID NO: 820.

[0223] In some embodiments, the miR-TS cassettes described herein comprise at least 1, at least 2, at least 3, or at least 4 miR-143-3p target sequences. In some embodiments, the miR-143-3p target sequences are at most 4, at most 3, at most 2, or at most 1 nucleotide(s) different from SEQ ID NO: 821. In some embodiments, miR-143-3p target sequences comprise or consist of SEQ ID NO: 821.

[0224] In some embodiments, the miR-TS cassettes described herein comprise at least 1, at least 2, at least 3, or at least 4 miR-145-3p target sequences. In some embodiments, the miR-145-3p target sequences are at most 4, at most 3, at most 2, or at most 1 nucleotide(s) different from SEQ ID NO: 822. In some embodiments, the miR-145-3p target sequences comprise or consist of SEQ ID NO: 822.

[0225] In some embodiments, the miR-TS cassettes described herein comprise at least 1, at least 2, at least 3, or at least 4 miR-145-5p target sequences. In some embodiments, the miR-145-5p target sequences are at most 4, at most 3, at most 2, or at most 1 nucleotide(s) different from SEQ ID NO: 823. In some embodiments, the miR-145-5p target sequences comprise or consist of SEQ ID NO: 823. In some embodiments, the virus described herein comprises one or more miR-145-5p target sequences in UL8.

[0226] In some embodiments, the miR-TS cassettes described herein comprise at least 1, at least 2, at least 3, or at least 4 miR-184-3p target sequences. In some embodiments, the miR-184-3p target sequences are at most 4, at most 3, at most 2, or at most 1 nucleotide(s) different from SEQ ID NO: 824. In some embodiments, the miR-184-3p target sequences comprise or consist of SEQ ID NO: 824.

[0227] In some embodiments, the miR-TS cassettes described herein comprise at least 1, at least 2, at least 3, or at least 4 miR-199a-3p target sequences. In some embodiments, the miR-199a-3p target sequences are at most 4, at most 3, at most 2, or at most 1 nucleotide(s) different from SEQ ID NO: 825. In some embodiments, the miR-199a-3p target sequences comprise or consist of SEQ ID NO: 825.

[0228] In some embodiments, the miR-TS cassettes described herein comprise at least 1, at least 2, at least 3, or at least 4 miR-199a-5p target sequences. In some embodiments, the miR-199a-5p target sequences are at most 4, at most 3, at most 2, or at most 1 nucleotide(s) different from SEQ ID NO: 826. In some embodiments, the miR-199a-5p target sequences comprise or consist of SEQ ID NO: 826.

[0229] In some embodiments, the miR-TS cassettes described herein comprise at least 1, at least 2, at least 3, or at least 4 miR-204-5p target sequences. In some embodiments, the miR-204-5p target sequences are at most 4, at most 3, at most 2, or at most 1 nucleotide(s) different from SEQ ID NO: 827. In some embodiments, the miR-204-5p target sequences comprise or consist of SEQ ID NO: 827.

[0230] In some embodiments, the miR-TS cassettes described herein comprise at least 1, at least 2, at least 3, or at least 4 miR-208b-3p target sequences. In some embodiments, the miR-208b-3p target sequences are at most 4, at most 3, at most 2, or at most 1 nucleotide(s) different from SEQ ID NO: 828. In some embodiments, the miR-208b-3p target sequences comprise or consist of SEQ ID NO: 828.

[0231] In some embodiments, the miR-TS cassettes described herein comprise at least 1, at least 2, at least 3, or at least 4 miR-214-3p target sequences. In some embodiments, the miR-214-3p target sequences are at most 4, at most 3, at most 2, or at most 1 nucleotide(s) different from SEQ ID NO: 829. In some embodiments, the miR-214-3p target sequences comprise or consist of SEQ ID NO: 829.

[0232] In some embodiments, the miR-TS cassettes described herein comprise at least 1, at least 2, at least 3, or at least 4 miR-217-5p target sequences. In some embodiments, the miR-217-5p target sequences are at most 4, at most 3, at most 2, or at most 1 nucleotide(s) different from SEQ ID NO: 830. In some embodiments, the miR-217-5p target sequences comprise or consist of SEQ ID NO: 830.

[0233] In some embodiments, the miR-TS cassettes described herein comprise at least 1, at least 2, at least 3, or at least 4 miR-219a-5p target sequences. In some embodiments, the miR-219a-5p target sequences are at most 4, at most 3, at most 2, or at most 1 nucleotide(s) different from SEQ ID NO: 831. In some embodiments, the miR-219a-5p target sequences comprise or consist of SEQ ID NO: 831.

[0234] In some embodiments, the miR-TS cassettes described herein comprise at least 1, at least 2, at least 3, or at least 4 miR-223-3p target sequences. In some embodiments, the miR-223-3p target sequences are at most 4, at most 3, at most 2, or at most 1 nucleotide(s) different from SEQ ID NO: 832. In some embodiments, the miR-223-3p target sequences comprise or consist of SEQ ID NO: 832.

[0235] In some embodiments, the miR-TS cassettes described herein comprise at least 1, at least 2, at least 3, or at least 4 miR-34a-5p target sequences. In some embodiments, the miR-34a-5p target sequences are at most 4, at most 3, at most 2, or at most 1 nucleotide(s) different from SEQ ID NO: 833. In some embodiments, the miR-34a-5p target sequences comprise or consist of SEQ ID NO: 833.

[0236] In some embodiments, the miR-TS cassettes described herein comprise at least 1, at least 2, at least 3, or at least 4 miR-451a target sequences. In some embodiments, the miR-451a target sequences are at most 4, at most 3, at most 2, or at most 1 nucleotide(s) different from SEQ ID NO: 834. In some embodiments, the miR-451a target sequences comprise or consist of SEQ ID NO: 834.

[0237] In some embodiments, the miR-TS cassettes described herein comprise at least 1, at least 2, at least 3, or at least 4 miR-559-5p target sequences. In some embodiments, the miR-559-5p target sequences are at most 4, at most 3, at most 2, or at most 1 nucleotide(s) different from SEQ ID NO: 835. In some embodiments, the miR-559-5p target sequences comprise or consist of SEQ ID NO: 835.

[0238] In some embodiments, the miR-TS cassettes described herein comprise at least 1, at least 2, at least 3, or at least 4 miR-Let-7a-5p target sequences. In some embodiments, the miR-Let-7a-5p target sequences are at most 4, at most 3, at most 2, or at most 1 nucleotide(s) different from SEQ ID NO: 836. In some embodiments, the miR-Let-7a-5p target sequences comprise or consist of SEQ ID NO: 836.

[0239] In some embodiments, the miR-TS cassettes described herein comprise at least 1, at least 2, at least 3, or at least 4 miR-9-5p target sequences. In some embodiments, the miR-9-5p target sequences are at most 4, at most 3, at most 2, or at most 1 nucleotide(s) different from SEQ ID NO: 837. In some embodiments, the miR-9-5p target sequences comprise or consist of SEQ ID NO: 837.

[0240] In some embodiments, the miR-TS cassettes described herein comprise at least 1, at least 2, at least 3, or at least 4 miR-34b-5p target sequences. In some embodiments, the miR-34b-5p target sequences are at most 4, at most 3, at most 2, or at most 1 nucleotide(s) different from SEQ ID NO: 867. In some embodiments, the miR-34b-5p target sequences comprise or consist of SEQ ID NO: 867. In some embodiments, the virus described herein comprises one or more miR-34b-5p target sequences in UL8.

[0241] In some embodiments, the miR-TS cassettes described herein comprise at least 1, at least 2, at least 3, or at least 4 miR-34b-3p target sequences. In some embodiments, the miR-34b-3p target sequences are at most 4, at most 3, at most 2, or at most 1 nucleotide(s) different from SEQ ID NO: 868. In some embodiments, the miR-34b-3p target sequences comprise or consist of SEQ ID NO: 868.

[0242] In some embodiments, the miR-TS cassettes described herein comprise at least 1, at least 2, at least 3, or at least 4 miR-34c-5p target sequences. In some embodiments, the miR-34c-5p target sequences are at most 4, at most 3, at most 2, or at most 1 nucleotide(s) different from SEQ ID NO: 869. In some embodiments, the miR-34c-5p target sequences comprise or consist of SEQ ID NO: 869. In some embodiments, the virus described herein comprises one or more miR-34c-5p target sequences in ICP8. In some embodiments, the virus described herein comprises one or more miR-34c-5p target sequences in ICP27. In some embodiments, the virus described herein comprises one or more miR-34c-5p target sequences in UL8. In some embodiments, the virus described herein comprises one or more miR-34c-5p target sequences in ICP8 and ICP27. In some embodiments, the virus described herein comprises one or more miR-34c-5p target sequences in ICP27 and UL8. In some embodiments, the virus described herein comprises one or more miR-34c-5p target sequences in ICP8 and UL8.

[0243] In some embodiments, the miR-TS cassettes described herein comprise at least 1, at least 2, at least 3, or at least 4 miR-128T target sequences. In some embodiments, the miR-128T target sequences are at most 4, at most 3, at most 2, or at most 1 nucleotide(s) different from SEQ ID NO: 870. In some embodiments, the miR-128T target sequences comprise or consist of SEQ ID NO: 870. In some embodiments, the virus described herein comprises one or more miR-128T target sequences in ICP4. In some embodiments, the virus described herein comprises one or more miR-128T target sequences in ICP27. In some embodiments, the virus described herein comprises one or more miR-128T target sequences in ICP4 and ICP27.

[0244] In some embodiments, the miR-TS cassettes described herein comprise at least 1, at least 2, at least 3, or at least 4 miR-129-2-3p target sequences. In some embodiments, the miR-129-2-3p target sequences are at most 4, at most 3, at most 2, or at most 1 nucleotide(s) different from SEQ ID NO: 871. In some embodiments, the miR-129-2-3p target sequences comprise or consist of SEQ ID NO: 871. In some embodiments, the virus described herein comprises one or more miR-129-2-3p target sequences in ICP8.

[0245] In some embodiments, the miR-TS cassettes described herein comprise at least 1, at least 2, at least 3, or at least 4 miR-132-3p target sequences. In some embodiments, the miR-132-3p target sequences are at most 4, at most 3, at most 2, or at most 1 nucleotide(s) different from SEQ ID NO: 872. In some embodiments, the miR-132-3p target sequences comprise or consist of SEQ ID NO: 872. In some embodiments, the virus described herein comprises one or more miR-132-3p target sequences in ICP8. In some embodiments, the virus described herein comprises one or more miR-132-3p target sequences in UL8. In some embodiments, the virus described herein comprises one or more miR-132-3p target sequences in ICP8 and UL8.

[0246] Table 2 below provides sequences of exemplary miRNAs that can bind to the miRNA target sequences in the oncolytic viruses described herein. Additional miRNA sequences are provided in SEQ ID NOs: 33-803.

TABLE 2
Exemplary miRNAs and Target Sequences

| | | SEQ | | SEQ |
|---|---|---|---|---|
| miRNA | miRNA Sequence | ID: | miR-TS | ID: |
| 122-5p | uggagugugacaaugguguuug | 1 | caaacaccattgtcacactcca | 804 |
| 124-3p | uaaggcacgcggugaaugcc | 2 | ggcattcaccgcgtgcctta | 805 |
| 125a-5p | ucccugagacccuuuaaccuguga | 3 | tcacaggttaaagggtctcaggga | 806 |
| 126-3p | ucguaccgugaguaauaaugcg | 4 | cgcattattactcacggtacga | 807 |
| | | | cacattattactcacggtacga | 808 |
| 127a-3p | ucggauccgucugagcuuggcu | 5 | agccaagctcagacggatccga | 809 |
| 128-3p | ucacagugaaccggucucuuu | 6 | aaagagaccggttcactgtga | 810 |
| | | | aaagagaccggttcactgtgg | 811 |
| 129-3p | aagcccuuaccccaaaaaguau | 7 | atactttttggggtaagggctt | 812 |
| 129-5p | cuuuuugggucugggcuugc | 8 | gcaagcccagaccgcaaaaag | 813 |
| 130b-3p | cagugcaaugaugaaagggcau | 9 | atgccctttcatcattgcactg | 814 |
| 130b-5p | acucuuucccuguugcacuac | 10 | gtagtgcaacagggaaagagt | 815 |
| 133a-3p | uuugguccccuucaaccagcug | 11 | cagctggttgaaggggaccaaa | 816 |
| 133b-3p | uuugguccccuucaaccagcua | 12 | tagctggttgaaggggaccaaa | 817 |
| 134-3p | ccugugggccaccuagucaccaa | 13 | ttggtgactaggtggcccacagg | 818 |
| 137-3p | uuauugcuuaagaauacgcguag | 14 | ctacgcgtattcttaagcaataa | 819 |
| 1-3p | uggaauguaaagaaguauguau | 15 | atacatacttctttacattcca | 820 |
| 143-3p | ugagaugaagcacuguagcuc | 16 | gagctacagtgcttcatctca | 821 |
| 145-3p | ggauuccuggaaauacuguucu | 17 | agaacagtatttccaggaatcc | 822 |
| 145-5p | guccaguuuucccaggaaucccu | 18 | agggattcctgggaaaactggac | 823 |
| 184-3p | uggacggagaacugauaagggu | 19 | acccttatcagttctccgtcca | 824 |
| 199a-3p | acaguagucugcacauugguua | 20 | taaccaatgtgcagactactgt | 825 |
| 199a-5p | cccaguguucagacuaccuguuc | 21 | gaacaggtagtctgaacactggg | 826 |
| 204-5p | uucccuuugucauccuaugccu | 22 | aggcataggatgacaaagggaa | 827 |
| 208b-3p | auaagacgaacaaaagguuugu | 23 | acaaaccttttgttcgtcttat | 828 |
| 214-3p | acagcaggcacagacaggcagu | 24 | actgcctgtctgtgcctgctgt | 829 |
| 217-5p | uacugcaucaggaacugauugga | 25 | tccaatcagttcctgatgcagta | 830 |
| 219a-5p | ugauuguccaaacgcaauucu | 26 | agaattgcgtttggacaatca | 831 |
| 223-3p | ugucaguuugucaaauacccca | 27 | tggggtatttgacaaactgaca | 832 |
| 34a-5p | uggcagugucuuagcugguugu | 28 | acaaccagctaagacactgcca | 833 |
| 451a | aaaccguuaccauuacugaguu | 29 | aactcagtaatggtaacggttt | 834 |
| 559-5p | uaaaguaaauaugcaccaaaa | 30 | ttttggtgcatatttacttta | 835 |
| Let7a-5p | ugagguaguagguuguauaguu | 31 | aactatacaacctactacctca | 836 |
| 9-5p | ucuuugguuaucuagcuguauga | 32 | tcatacagctagataaccaaaga | 837 |
| 34b-5p | uaggcagugucauuagcugauug | 861 | caatcagctaatgacactgccta | 867 |
| 34b-3p | caaucacuaacuccacugccau | 862 | atggcagtggagttagtgattg | 868 |
| 34c-5p | aggcaguguaguuagcugauugc | 863 | gcaatcagctaactacactgcct | 869 |
| 128T | CCACAGUGAACCGGUCUCUUU | 864 | AAAGAGACCGGTTCACTGTGG | 870 |
| 129-2-3p | aagcccuuaccccaaaaagcau | 865 | atgctttttggggtaagggctt | 871 |
| 132-3p | uaacagucuacagccauggucg | 866 | cgaccatggctgtagactgtta | 872 |

[0247] In some embodiments, the miR-TS cassettes comprise one or more additional polynucleotide sequences that enable the cassette to be inserted into the locus of a viral gene. For example, a miR-TS cassette may further comprise short polynucleotide sequence on the 5′ and 3′ ends that are complementary to a nucleic acid sequence at a desired location in the viral genome. Such sequences are referred to herein as “homology arms” and facilitate the insertion of a miR-TS cassette into a specific location in the viral genome.

[0248] In some embodiments, the miR-TS cassettes disclosed comprise two or more pluralities of miR-TSs each corresponding to a different miRNA and the miR-TSs are selected to protect diverse cell types or organs from an oncolytic virus. In some embodiments, the pluralities of miR-TSs are interleaved rather than in tandem to one another. In some embodiments, the miR-TS cassettes have short (e.g., 4-15 nt in length) spacers, resulting in a more compact cassette. In some embodiments, the spacers are 4 nt in length. In some embodiments, the miR-TS cassettes are free from (or have reduced) RNA secondary structures that inhibit activity of the miR-TSs. In some embodiments, the miR-TS cassettes are free from (or have reduced) seed sequences for miRNAs associated with carcinogenesis, malignant transformation, or metastasis (i.e., “oncomiRs”). In some embodiments, the miR-TS cassettes are free from (or have reduced) polyadenylation sites.

Oncolytic Viruses Comprising miR-TS Cassettes

[0249] In some embodiments, a recombinant oncolytic virus may comprise one miR-TS cassette incorporated into a locus of one essential viral gene, wherein the miR-TS cassette comprises a plurality of miRNA target sequences, such that the recombinant oncolytic virus comprises a plurality of miRNA target sequences incorporated into a locus of one essential viral gene. In some embodiments, the miR-TS cassette may comprise a plurality of miRNA target sequences, wherein each miRNA target sequence of the plurality is a target for the same miRNA, such that the recombinant oncolytic virus comprises a plurality (e.g., 2, 3, 4, 5, 6, 7, 8, 9, 10 or more) copies of the same miRNA target sequence incorporated into a locus of an essential viral gene. For example, in some embodiments, a recombinant oncolytic HSV may comprise a miR-TS cassette comprising 2, 3, 4, 5, 6 or more target sequences inserted into one of ICP4, ICP27, ICP8, ICP22, ICP34.5, UL5, UL8, UL9, UL30, UL39/40, or UL42. In some embodiments, a recombinant oncolytic HSV may comprise a miR-TS cassette comprising 2, 3, 4, or more target sequences inserted into one of ICP8, ICP22, ICP34.5, UL5, UL8, UL9, UL30, UL39/40, or UL42. In some embodiments, a recombinant oncolytic HSV may comprise a miR-TS cassette comprising 2, 3, 4, 5, 6 or more target sequence inserted into one of ICP4, ICP27, ICP34.5, UL8, or UL9.

[0250] In some embodiments, the plurality of miRNA target sequences comprises at least two different miRNA target sequences, at least three different miRNA target sequences, or at least four different miRNA target sequences, such that the recombinant oncolytic virus comprises one or more copies of at least 2, 3, or 4 different miRNA target sequence incorporated into a locus of an essential viral gene.

[0251] In some embodiments, a recombinant oncolytic virus may comprise one miR-TS cassette incorporated into the 3′ or 5′ untranslated region (UTR) of the viral genome. In such embodiments, the miR-TS cassette may comprise one copy of a miRNA target sequence, such that the recombinant oncolytic virus comprises one copy of a miRNA target sequence incorporated into the 3′ or 5′ UTR of the viral genome. For example, in some embodiments, a recombinant HSV may comprise a miR-TS cassette inserted into the 3′ or 5′ UTR of a viral gene.

[0252] In some aspects, the plurality of miRNA target sequences comprises at least two different miRNA target sequences, at least three different miRNA target sequences, or at least four different miRNA target sequences, such that the recombinant oncolytic virus comprises one or more copies of at least 2, 3, or 4 different miRNA target sequence incorporated into the 3′ or 5′ UTR of the viral gene.

[0253] In some embodiments, a recombinant oncolytic virus may comprise a miR-TS cassette incorporated into a locus of two or more essential viral genes. In some embodiments, the recombinant oncolytic virus is an HSV and the two or more essential viral genes are selected from the group consisting of ICP4, ICP27, ICP8, ICP22, ICP34.5, UL5, UL8, UL9, UL30, UL39/40, or UL42. In some embodiments, the recombinant oncolytic virus is an HSV and the two or more essential viral genes are selected from the group consisting of ICP8, ICP22, ICP34.5, UL5, UL8, UL9, UL30, UL39/40, or UL42. In some embodiments, the recombinant oncolytic virus is an HSV and the two or more essential viral genes are selected from the group consisting of ICP4, ICP27, ICP34.5, UL8, or UL9. In some embodiments, the recombinant oncolytic virus is an HSV and the two or more essential viral genes are selected from the group consisting of ICP27, ICP4, ICP34.5, UL8, and UL42.

[0254] In some embodiments, a recombinant oncolytic herpesvirus may comprise a miR-TS cassette incorporated into a locus of one or more viral genes selected from ICP4, ICP8, ICP27 and UL8. In some embodiments, a recombinant oncolytic herpesvirus may comprise a miR-TS cassette incorporated into a locus of two or more viral genes selected from ICP4, ICP8, ICP27 and UL8. In some embodiments, a recombinant oncolytic herpesvirus may comprise a miR-TS cassette incorporated into a locus of three or more viral genes selected from ICP4, ICP8, ICP27 and UL8. In some embodiments, a recombinant oncolytic herpesvirus may comprise a miR-TS cassette incorporated into a locus of all of the viral genes ICP4, ICP8, ICP27 and UL8. In some embodiments, a recombinant oncolytic herpesvirus may comprise a miR-TS cassette incorporated into a locus of each of the viral genes ICP4 and ICP8. In some embodiments, a recombinant oncolytic herpesvirus may comprise a miR-TS cassette incorporated into both copies of ICP4. In some embodiments, the recombinant oncolytic herpesvirus is a recombinant herpes simplex virus (HSV).

[0255] In some embodiments, the recombinant oncolytic virus comprises a miR-TS cassette comprises one or more miRNA target sequences for miR-34b-5p, miR-34b-3p, miR-34c-5p, miR-122-5p, miR-124-3p, miR-128T, miR-129-5p, miR-129-2-3p, miR-132-3p, miR-137-3p, miR-145-5p, or any combination thereof. In some embodiments, the recombinant oncolytic virus comprises a miR-TS cassette comprises one or more miRNA target sequences for miR-34b-5p, miR-34b-3p, miR-34c-5p, miR-122-5p, miR-124-3p, miR-128T, miR-129-5p, miR-129-2-3p, miR-132-3p, miR-137-3p, and miR-145-5p. In some embodiments, the recombinant oncolytic virus comprises a miR-TS cassette comprises one or more miRNA target sequences for miR-34b-5p, miR-34c-5p, miR-122-5p, miR-124-3p, miR-128T, miR-129-2-3p, miR-132-3p, miR-137-3p, miR-145-5p, or any combination thereof. In some embodiments, the recombinant oncolytic virus comprises a miR-TS cassette comprises one or more miRNA target sequences for miR-34b-5p, miR-34c-5p, miR-122-5p, miR-124-3p, miR-128T, miR-129-2-3p, miR-132-3p, miR-137-3p, and miR-145-5p. In some embodiments, the recombinant oncolytic virus comprises a miR-TS cassette comprises one or more miRNA target sequences for miR-122-5p, miR-124-3p, miR-128T, miR-137-3p, miR-34c-5p, miR-129-2-3p, miR-132-3p, or any combination thereof. In some embodiments, the recombinant oncolytic virus comprises a miR-TS cassette comprises one or more miRNA target sequences for miR-122-5p, miR-124-3p, miR-128T, miR-137-3p, miR-34c-5p, miR-129-2-3p, and miR-132-3p. In some embodiments, the recombinant oncolytic virus is a recombinant herpes simplex virus (HSV).

[0256] In some embodiments, the recombinant oncolytic virus comprises one or more miRNA target sequence for a miRNA that has lower expression in a glioblastoma cell than in a normal cell in the brain. Non-limiting examples of such miRNAs are listed in Table 3 below.

TABLE 3
Non-limiting examples of miRNAs with lower
expression in glioblastoma cells

| | miRNA(s) that have lower expression in a |
|---|---|
| Normal cell | glioblastoma cell than in the normal cell |
| Neuron | miR-124-3p, miR-128T, miR-137-3p |
| Ependymal Cells | miR-34b-5p, miR-34b-3p, miR-34c-5p |
| Oligodendrocyte | miR-129-5p, miR-129-2-3p, miR-132-3p |
| Astrocyte | miR-34b-5p, miR-34b-3p, miR-145-5p |
| Endothelial Cells | miR-145-5p |
| Hepatocytes | miR-122-5p |

[0257] In some embodiments, the recombinant oncolytic virus comprises one or more miRNA target sequence for a miRNA that has lower expression in glioblastoma cells than in neurons. In some embodiments, such a miRNA is miR-124-3p, miR-128T, miR-137-3p, or any combination thereof. In some embodiments, such miRNAs comprises miR-124-3p, miR-128T, and miR-137-3p.

[0258] In some embodiments, the recombinant oncolytic virus comprises one or more miRNA target sequence for a miRNA that has lower expression in glioblastoma cells than in ependymal cells. In some embodiments, such a miRNA is miR-34b-5p, miR-34b-3p, miR-34c-5p, or any combination thereof. In some embodiments, such a miRNA is miR-34b-5p, miR-34c-5p, or any combination thereof. In some embodiments, such miRNAs comprise miR-34b-5p and miR-34c-5p.

[0259] In some embodiments, the recombinant oncolytic virus comprises one or more miRNA target sequence for a miRNA that has lower expression in glioblastoma cells than in oligodendrocyte. In some embodiments, such a miRNA is miR-129-5p, miR-129-2-3p, miR-132-3p, or any combination thereof. In some embodiments, such a miRNA is miR-129-2-3p, miR-132-3p, or any combination thereof. In some embodiments, such miRNAs comprise miR-129-2-3p and miR-132-3p.

[0260] In some embodiments, the recombinant oncolytic virus comprises one or more miRNA target sequence for a miRNA that has lower expression in glioblastoma cells than in astrocyte. In some embodiments, such a miRNA is miR-34b-5p, miR-34b-3p, miR-145-5p, or any combination thereof.

[0261] In some embodiments, the recombinant oncolytic virus comprises one or more miRNA target sequence for a miRNA that has lower expression in glioblastoma cells than in endothelial cells. In some embodiments, such a miRNA comprises miR-145-5p.

[0262] In some embodiments, the recombinant oncolytic virus comprises one or more miRNA target sequence for a miRNA that has lower expression in glioblastoma cells than in hepatocytes. In some embodiments, such a miRNA comprises miR-122-5p.

[0263] In some embodiments, the recombinant oncolytic virus comprises
[0264] (a) one or more miRNA target sequences for miR-122-5p;
[0265] (b) one or more miRNA target sequences for miR-145-5p;
[0266] (c) one or more miRNA target sequences for miR-124-3p, miR-128T, miR-137-3p, or any combination thereof;
[0267] (d) one or more miRNA target sequences for miR-34b-5p, miR-34c-5p, or any combination thereof;
[0268] (e) one or more miRNA target sequences for miR-129-2-3p, miR-132-3p, or any combination thereof; or
[0269] (f) any combination of (a)-(e).

[0270] In some embodiments, the recombinant oncolytic virus comprises
[0271] (a) one or more miRNA target sequences for miR-34c-5p;
[0272] (b) one or more miRNA target sequences for miR-129-5p, miR-129-2-3p, miR-132-3p, or any combination thereof;
[0273] (c) one or more miRNA target sequences for miR-34b-5p, miR-34b-3p, miR-145-5p, or any combination thereof;
[0274] (d) one or more miRNA target sequences for miR-124-3p, miR-128T, miR-137-3p, or any combination thereof; or
[0275] (e) any combination of (a)-(d).

[0276] In some embodiments, the recombinant oncolytic virus comprises
[0277] (a) one or more miRNA target sequences for miR-34b-5p, miR-34b-3p, miR-34c-5p, or any combination thereof;
[0278] (b) one or more miRNA target sequences for miR-129-5p, miR-129-2-3p, miR-132-3p, or any combination thereof;
[0279] (c) one or more miRNA target sequences for miR-124-3p, miR-128T, miR-137-3p, or any combination thereof; or
[0280] (d) any combination of (a)-(c).

[0281] In some embodiments, the recombinant oncolytic virus comprises
[0282] (a) one or more miRNA target sequences for miR-122-5p;
[0283] (b) one or more miRNA target sequences for miR-145-5p;
[0284] (c) one or more miRNA target sequences for miR-124-3p, miR-128T, miR-137-3p, or any combination thereof;
[0285] (d) one or more miRNA target sequences for miR-34b-5p, miR-34c-5p, or any combination thereof; and
[0286] (e) one or more miRNA target sequences for miR-129-2-3p, miR-132-3p, or any combination thereof.

[0287] In some embodiments, the recombinant oncolytic virus comprises
[0288] (a) one or more miRNA target sequences for miR-34c-5p;
[0289] (b) one or more miRNA target sequences for miR-129-5p, miR-129-2-3p, miR-132-3p, or any combination thereof;
[0290] (c) one or more miRNA target sequences for miR-34b-5p, miR-34b-3p, miR-145-5p, or any combination thereof; and
[0291] (d) one or more miRNA target sequences for miR-124-3p, miR-128T, miR-137-3p, or any combination thereof.

[0292] In some embodiments, the recombinant oncolytic virus comprises
[0293] (a) one or more miRNA target sequences for miR-34b-5p, miR-34b-3p, miR-34c-5p, or any combination thereof;
[0294] (b) one or more miRNA target sequences for miR-129-5p, miR-129-2-3p, miR-132-3p, or any combination thereof; and
[0295] (d) one or more miRNA target sequences for miR-124-3p, miR-128T, miR-137-3p, or any combination thereof.

[0296] In some embodiments, the target sequences are for miRNAs that are expressed in normal brain tissue but not expressed in tumor tissue (e.g., glioblastoma). In some embodiments, the miRNAs are expressed broadly in the brain, for example in neurons, oligodendrocytes, ependymal cells, and/or endothelial cells. In some embodiments, the miRNA target sequences are inserted into one or more viral genes. In some embodiments, viral gene(s) were selected based on their sensitivity to RNA interference. Descriptions of methods for screening and selecting such viral gene(s) can be found, for example, in US 2020/0206285, the content of which is incorporated by reference herein in its entirety for all purposes. In some embodiments, from the candidate viral gene(s) that are sensitive to RNA interference, the viral gene(s) essential for virus replication were selected for inserting the miRNA target sequence(s). In some embodiments, the viral gene(s) were expressed early in the virus life cycle, prior to replication of the virus genome. In some embodiments, the target sequences for one particular miRNA are inserted into more than one viral genes (e.g., two different essential viral genes) to ensure deeper coverage for the protection of corresponding normal cells with high expression of that miRNA.

[0297] In some embodiments, the miR-TS cassette comprises one or more miRNA target sequences for miR-34c-5p, miR-124-3p, miR-129-2-3p, miR-132-3p, or any combination thereof. In some embodiments, the miR-TS cassette comprises at least 1, 2, or 3 copies of a target sequence for miR-34c-5p. In some embodiments, the miR-TS cassette comprises at least 1, 2, or 3 copies of a target sequence for miR-124-3p. In some embodiments, the miR-TS cassette comprises at least 1, 2, or 3 copies of a target sequence for miR-129-2-3p. In some embodiments, the miR-TS cassette comprises at least 1, 2, or 3 copies of a target sequence for miR-132-3p. In some embodiments, the miR-TS cassette comprises one or more miRNA target sequences for each of miR-34c-5p, miR-124-3p, miR-129-2-3p, and miR-132-3p. In some embodiments, the miR-TS cassette is incorporated into ICP8 viral gene of the recombinant HSV. In some embodiments, the miRNA target sequences in the miR-TS cassettes are arranged as follows:
[0298] (34c-5p)-(124-3p)-(132-3p)-(129-2-3p)-(34c-5p)-(124-3p)-(129-2-3p)-(132-3p)-(124-3p)-(129-2-3p)-(132-3p)-(34c-5p).
   In some embodiments, the miR-TS cassette comprises a polynucleotide sequence having at least 80%, at least 85%, at least 90%, at least 95%, at least 96%, at least 97%, at least 98%, or at least 99% identical to SEQ ID NO: 859. In some embodiments, the miR-TS cassette comprises the polynucleotide sequence of SEQ ID NO: 859.

[0299] In some embodiments, the miR-TS cassette comprises one or more miRNA target sequences for miR-122-5p, miR-124-3p, miR-128T, miR-137-3p, or any combination thereof. In some embodiments, the miR-TS cassette comprises at least 1, 2, or 3 copies of a target sequence for miR-122-5p. In some embodiments, the miR-TS cassette comprises at least 1, 2, or 3 copies of a target sequence for miR-124-3p. In some embodiments, the miR-TS cassette comprises at least 1, 2, or 3 copies of a target sequence for miR-128T. In some embodiments, the miR-TS cassette comprises at least 1, 2, or 3 copies of a target sequence for miR-137-3p. In some embodiments, the miR-TS cassette comprises one or more miRNA target sequences for each of miR-122-5p, miR-124-3p, miR-128T, and miR-137-3p. In some embodiments, the miR-TS cassette is incorporated into ICP4 viral gene of the recombinant HSV. In some embodiments, the miR-TS cassette is incorporated into both copies of the ICP4 viral gene in the viral genome. In some embodiments, the miRNA target sequences in the miR-TS cassettes are arranged as follows:
[0300] (137-3p)-(128T)-(122-5p)-(124-3p)-(122-5p)-(128T)-(137-3p)-(124-3p)-(128T)-(137-3p)-(124-3p)-(122-5p).

[0301] In some embodiments, the miR-TS cassette comprises a polynucleotide sequence having at least 80%, at least 85%, at least 90%, at least 95%, at least 96%, at least 97%, at least 98%, or at least 99% identical to SEQ ID NO: 858. In some embodiments, the miR-TS cassette comprises the polynucleotide sequence of SEQ ID NO: 858.

[0302] In some embodiments, the miR-TS cassette comprises one or more miRNA target sequences for miR-34c-5p, miR-124-3p, miR-128T, miR-137-3p, or any combination thereof. In some embodiments, the miR-TS cassette comprises at least 1, 2, or 3 copies of a target sequence for miR-34c-5p. In some embodiments, the miR-TS cassette comprises at least 1, 2, or 3 copies of a target sequence for miR-124-3p. In some embodiments, the miR-TS cassette comprises at least 1, 2, or 3 copies of a target sequence for miR-128T. In some embodiments, the miR-TS cassette comprises at least 1, 2, or 3 copies of a target sequence for miR-137-3p. In some embodiments, the miR-TS cassette comprises one or more miRNA target sequences for each of miR-34c-5p, miR-124-3p, miR-128T, and miR-137-3p. In some embodiments, the miR-TS cassette is incorporated into ICP27 viral gene of the recombinant HSV. In some embodiments, the miRNA target sequences in the miR-TS cassettes are arranged as follows:
[0303] (124-3p)-(128T)-(34c-5p)-(137-3p)-(128T)-(34c-5p)-(137-3p)-(124-3p)-(128T)-(137-3p)-(124-3p)-(34c-5p).

[0304] In some embodiments, the miR-TS cassette comprises a polynucleotide sequence having at least 80%, at least 85%, at least 90%, at least 95%, at least 96%, at least 97%, at least 98%, or at least 99% identical to SEQ ID NO: 873. In some embodiments, the miR-TS cassette comprises the polynucleotide sequence of SEQ ID NO: 873.

[0305] In some embodiments, the miR-TS cassette comprises one or more miRNA target sequences for miR-34b-3p, miR-34c-5p, miR-128T, miR-137-3p, or any combination thereof.

[0306] In some embodiments, the miR-TS cassette comprises at least 1, 2, or 3 copies of a target sequence for miR-34b-3p. In some embodiments, the miR-TS cassette comprises at least 1, 2, or 3 copies of a target sequence for miR-34c-5p. In some embodiments, the miR-TS cassette comprises at least 1, 2, or 3 copies of a target sequence for miR-128T. In some embodiments, the miR-TS cassette comprises at least 1, 2, or 3 copies of a target sequence for miR-137-3p. In some embodiments, the miR-TS cassette comprises one or more miRNA target sequences for each of miR-34b-3p, miR-34c-5p, miR-128T, and miR-137-3p. In some embodiments, the miR-TS cassette is incorporated into ICP27 viral gene of the recombinant HSV. In some embodiments, the miRNA target sequences in the miR-TS cassettes are arranged as follows:
[0307] (34b-3p)-(128T)-(137-3p)-(34c-5p)-(128T)-(34b-3p)-(137-3p)-(34c-5p)-(137-3p)-(34b-3p)-(128T)-(34c-5p).

[0308] In some embodiments, the miR-TS cassette comprises a polynucleotide sequence having at least 80%, at least 85%, at least 90%, at least 95%, at least 96%, at least 97%, at least 98%, or at least 99% identical to SEQ ID NO: 860. In some embodiments, the miR-TS cassette comprises the polynucleotide sequence of SEQ ID NO: 860.

[0309] In some embodiments, the miR-TS cassette comprises one or more miRNA target sequences for miR-34b-5p, miR-34c-5p, miR-132-3p, miR-145-5p, or any combination thereof. In some embodiments, the miR-TS cassette comprises at least 1, 2, or 3 copies of a target sequence for miR-34b-5p. In some embodiments, the miR-TS cassette comprises at least 1, 2, or 3 copies of a target sequence for miR-34c-5p. In some embodiments, the miR-TS cassette comprises at least 1, 2, or 3 copies of a target sequence for miR-132-3p. In some embodiments, the miR-TS cassette comprises at least 1, 2, or 3 copies of a target sequence for miR-145-5p. In some embodiments, the miR-TS cassette comprises one or more miRNA target sequences for each of miR-34b-5p, miR-34c-5p, miR-132-3p, and miR-145-5p. In some embodiments, the miR-TS cassette is incorporated into UL8 viral gene of the recombinant HSV. In some embodiments, the miRNA target sequences in the miR-TS cassettes are arranged as follows:
[0310] (145-5p)-(34b-5p)-(132-3p)-(34c-5p)-(145-5p)-(34c-5p)-(34b-5p)-(132-3p)-(34b-5p)-(145-5p)-(132-3p)-(34c-5p).

[0311] In some embodiments, the miR-TS cassette comprises a polynucleotide sequence having at least 80%, at least 85%, at least 90%, at least 95%, at least 96%, at least 97%, at least 98%, or at least 99% identical to SEQ ID NO: 874. In some embodiments, the miR-TS cassette comprises the polynucleotide sequence of SEQ ID NO: 874.

[0312] In some embodiments, the miR-TS cassette comprises one or more miRNA target sequences for miR-34b-5p, miR-34c-5p, miR-129-5p, miR-145-5p, or any combination thereof. In some embodiments, the miR-TS cassette comprises at least 1, 2, or 3 copies of a target sequence for miR-34b-5p. In some embodiments, the miR-TS cassette comprises at least 1, 2, or 3 copies of a target sequence for miR-34c-5p. In some embodiments, the miR-TS cassette comprises at least 1, 2, or 3 copies of a target sequence for miR-129-5p. In some embodiments, the miR-TS cassette comprises at least 1, 2, or 3 copies of a target sequence for miR-145-5p. In some embodiments, the miR-TS cassette comprises one or more miRNA target sequences for each of miR-34b-5p, miR-34c-5p, miR-129-5p, and miR-145-5p. In some embodiments, the miR-TS cassette is incorporated into UL8 viral gene of the recombinant HSV.

[0313] In some embodiments, the miR-TS cassette comprises one or more miRNA target sequences for miR-34b-5p, miR-34c-5p, miR-132-3p, miR-145-5p, or any combination thereof. In some embodiments, the miR-TS cassette comprises at least 1, 2, or 3 copies of a target sequence for miR-34b-5p. In some embodiments, the miR-TS cassette comprises at least 1, 2, or 3 copies of a target sequence for miR-34c-5p. In some embodiments, the miR-TS cassette comprises at least 1, 2, or 3 copies of a target sequence for miR-132-3p. In some embodiments, the miR-TS cassette comprises at least 1, 2, or 3 copies of a target sequence for miR-145-5p. In some embodiments, the miR-TS cassette comprises one or more miRNA target sequences for each of miR-34b-5p, miR-34c-5p, miR-132-3p, and miR-145-5p. In some embodiments, the miR-TS cassette is incorporated into UL8 viral gene of the recombinant HSV.

[0314] In some embodiments, the miR-TS cassette comprises one or more miRNA target sequences for miR-34b-3p, miR-34c-5p, miR-132-3p, miR-145-5p, or any combination thereof. In some embodiments, the miR-TS cassette comprises at least 1, 2, or 3 copies of a target sequence for miR-34b-3p. In some embodiments, the miR-TS cassette comprises at least 1, 2, or 3 copies of a target sequence for miR-34c-5p. In some embodiments, the miR-TS cassette comprises at least 1, 2, or 3 copies of a target sequence for miR-132-3p. In some embodiments, the miR-TS cassette comprises at least 1, 2, or 3 copies of a target sequence for miR-145-5p. In some embodiments, the miR-TS cassette comprises one or more miRNA target sequences for each of miR-34b-3p, miR-34c-5p, miR-132-3p, and miR-145-5p. In some embodiments, the miR-TS cassette is incorporated into UL8 viral gene of the recombinant HSV.

[0315] In some embodiments, the miR-attenuated oncolytic viruses described herein result in reduced viral replication in a cell that expresses a miR capable of binding to one or more of the incorporated miR-target sequences. “Viral replication” refers to the total number of viral replication cycles that occur in a particular cell or population of cells during a given amount of time. In some embodiments, viral replication can be measured directly by assessing the total viral titer present over the course of the given amount of time, or by assessing the number of viral genome copies present (e.g., by sequencing). In some embodiments, the viral vector may additionally comprise a detectable label, such as a fluorescent reporter. In such embodiments, viral replication may be assessed by measuring the fluorescence intensity of the reporter, or the number of cells that express the reporter. In some embodiments, viral replication can be measured indirectly by assessing the number of viable cells over the course of the given amount of time. For example, the level of viral replication would be expected to inversely correlate with the number of viable cells over time.

[0316] “Reduced viral replication” as used herein, refers to a level of viral replication that is lower in a first cell or first population of cells compared to a second cell or a second population of cells. In some embodiments, the level of viral replication in the first cell or first population of cells is reduced by at least 5% compared to the level of viral replication in the second cell or population of cells. In some embodiments, the level of viral replication in the first cell or first population of cells is reduced by at least 5%, 6%, 7%, 8%, 9%, 10%, 15%, 20%, 25%, 30%, 35%, 40%, 50%, 60%, 70%, 80%, 90% or more compared to the level of viral replication in the second cell or population of cells. In some embodiments, viral replication in the first cell or first population of cells is completely inhibited compared to the viral replication in the second cell or population of cells.

[0317] In some embodiments, the reduced viral replication in the first cell or first population of cells correlates with the expression of a miR capable of binding to the one or more miR-target sequences incorporated into one or more viral genes required for replication. In some embodiments, expression of a miR corresponding to the incorporated miR-target sequence therefore inhibits or reduces the expression of the replication gene, thereby inhibiting or reducing viral replication. In some embodiments, the second cell or second population of cells does not express, or has a reduced expression level, of the miR. In some embodiments, absent or reduced expression of a miR (e.g., in a cancer cell) corresponding to the incorporated miR-target sequence allows for viral replication to proceed. In some embodiments, the expression level of the miR in the second cell or population of cells is at least 5% lower than the expression level of the miR in the first cell or population. In some embodiments, the expression level of the miR in the second cell or population of cells is reduced at least 5%, 6%, 7%, 8%, 9%, 10%, 15%, 20%, 25%, 30%, 35%, 40%, 50%, 60%, 70%, 80%, 90% or more compared to the expression level of the miR in the first cell or population. In some embodiments, the second cell does not express the miR. In particular embodiments, the first cell is a non-cancerous cell and the second cell is a cancerous cell.

[0318] In some embodiments, a replication-restricted viral vector (e.g., a miR-attenuated viral vector) is used to treat glioblastoma.

[0319] In some embodiments, a recombinant oncolytic virus comprises a plurality of copies of one or more miRNA target sequences for miR-136-3p, miR-432-5p, miR-1-3p, miR-127-3p, miR-379-5p, miR-493-5p, miR-223-5p, miR-223-5p, miR-136-5p, miR-451a, miR-487b-3p, miR-370-3p, miR-410-3p, miR-431-3p, miR-4485-3p, miR-4485-5p, miR-127-5p, miR-409-3p, miR-338-3p, miR-559, miR-411-5p, miR-133a-5p, miR-143-3p, miR-376b-3p, miR-758-3p, miR-1, miR-101, miR-1180, miR-1236, miR-124-3p, miR-125b, miR-126, miR-1280, miR-133a, miR-133b, miR-141, miR-143, miR-144, miR-145, miR-155, miR-16, miR-18a, miR-192, miR-195, miR-200a, miR-200b, miR-200c, miR-203, miR-205, miR-214, miR-218, miR-23b, miR-26a, miR-29c, miR-320c, miR-34a, miR-370, miR-409-3p, miR-429, miR-451, miR-490-5p, miR-493, miR-576-3p, and/or miR-99a inserted into the 5′ UTR or 3′ UTR of one or more viral genes required for viral replication. This oncolytic virus may be used in methods and compositions for treating bladder cancer.

[0320] In some embodiments, a recombinant oncolytic virus comprises a plurality of copies of one or more miRNA target sequences for miR-1251-5p, miR-219a-5p, miR-219a-2-3p, miR-124-3p, miR-448, miR-138-2-3p, miR-490-5p, miR-129-1-3p, miR-1264, miR-3943, miR-490-3p, miR-383-5p, miR-133b, miR-129-2-3p, miR-128-2-5p, miR-133a-3p, miR-129-5p, miR-1-3p, miR-885-3p, miR-124-5p, miR-759, miR-7158-3p, miR-770-5p, miR-135a-5p, miR-885-5p, let-7g-5p, miR-100, miR-101, miR-106a, miR-124, miR-124a, miR-125a, miR-125a-5p, miR-125b, miR-127-3p, miR-128, miR-129, miR-136, miR-137, miR-139-5p, miR-142-3p, miR-143, miR-145, miR-146b-5p, miR-149, miR-152, miR-153, miR-195, miR-21, miR-212-3p, miR-219-5p, miR-222, miR-29b, miR-31, miR-3189-3p, miR-320, miR-320a, miR-326, miR-330, miR-331-3p, miR-340, miR-342, miR-34a, miR-376a, miR-449a, miR-483-5p, miR-503, miR-577, miR-663, miR-7, miR-7-5p, miR-873, let-7a, let-7f, miR-107, miR-122, miR-124-5p, miR-139, miR-146a, miR-146b, miR-15b, miR-16, miR-181a, miR-181a-1, miR-181a-2, miR-181b, miR-181b-1, miR-181b-2, miR-181c, miR-181d, miR-184, miR-185, miR-199a-3p, miR-200a, miR-200b, miR-203, miR-204, miR-205, miR-218, miR-23b, miR-26b, miR-27a, miR-29c, miR-328, miR-34c-3p, miR-34c-5p, miR-375, miR-383, miR-451, miR-452, miR-495, miR-584, miR-622, miR-656, miR-98, miR-124-3p, miR-181b-5p, miR-200b, and/or miR-3189-3p inserted into the 5′ UTR or 3′ UTR of one or more viral genes required for viral replication. This oncolytic virus may be used in methods and compositions for treating brain cancer. In certain embodiments, the brain cancer is astrocytoma, glioblastoma, or glioma.

[0321] In some embodiments, a recombinant oncolytic virus comprises a plurality of copies of one or more miRNA target sequences for miR-10b-5p, miR-126-3p, miR-145-3p, miR-451a, miR-199b-5p, miR-5683, miR-3195, miR-3182, miR-1271-5p, miR-204-5p, miR-409-5p, miR-136-5p, miR-514a-5p, miR-559, miR-483-3p, miR-1-3p, miR-6080, miR-144-3p, miR-10b-3p, miR-6130, miR-6089, miR-203b-5p, miR-4266, miR-4327, miR-5694, miR-193b, let-7a, let-7a-1, let-7a-2, let-7a-3, let-7b, let-7c, let-7d, let-7e, let-7f-1, let-7f-2, let-7g, let-7i, miR-100, miR-107, miR-10a, miR-10b, miR-122, miR-124, miR-1258, miR-125a-5p, miR-125b, miR-126, miR-127, miR-129, miR-130a, miR-132, miR-133a, miR-143, miR-145, miR-146a, miR-146b, miR-147, miR-148a, miR-149, miR-152, miR-153, miR-15a, miR-16, miR-17-5p, miR-181a, miR-1826, miR-183, miR-185, miR-191, miR-193a-3p, miR-195, miR-199b-5p, miR-19a-3p, miR-200a, miR-200b, miR-200c, miR-205, miR-206, miR-211, miR-216b, miR-218, miR-22, miR-26a, miR-26b, miR-300, miR-30a, miR-31, miR-335, miR-339-5p, miR-33b, miR-34a, miR-34b, miR-34c, miR-374a, miR-379, miR-381, miR-383, miR-425, miR-429, miR-450b-3p, miR-494, miR-495, miR-497, miR-502-5p, miR-517a, miR-574-3p, miR-638, miR-7, miR-720, miR-873, miR-874, miR-92a, miR-98, miR-99a, mmu-miR-290-3p, and/or mmu-miR-290-5p inserted into the 5′ UTR or 3′ UTR of one or more viral genes required for viral replication. This oncolytic virus may be used in methods and compositions for treating breast cancer.

[0322] In some embodiments, a recombinant oncolytic virus comprises a plurality of copies of one or more miRNA target sequences for miR-143, miR-145, miR-17-5p, miR-203, miR-214, miR-218, miR-335, miR-342-3p, miR-372, miR-424, miR-491-5p, miR-497, miR-7, miR-99a, miR-99b, miR-100, miR-101, miR-15a, miR-16, miR-34a, miR-886-5p, miR-106a, miR-124, miR-148a, miR-29a, and/or miR-375 inserted into the 5′ UTR or 3′ UTR of one or more viral genes required for viral replication. This oncolytic virus may be used in methods and compositions for treating cervical cancer.

[0323] In some embodiments, a recombinant oncolytic virus comprises a plurality of copies of one or more miRNA target sequences for miR-133a-5p, miR-490-5p, miR-124-3p, miR-137, miR-655-3p, miR-376c-3p, miR-369-5p, miR-490-3p, miR-432-5p, miR-487b-3p, miR-342-3p, miR-223-3p, miR-136-3p, miR-136-3p, miR-143-5p, miR-1-3p, miR-214-3p, miR-143-3p, miR-199a-3p, miR-199b-3p, miR-451a, miR-127-3p, miR-133a-3p, miR-145-5p, miR-145-3p, miR-199a-5p, let-7a-1, let-7a-2, let-7a-3, let-7b, let-7c, let-7d, let-7e, let-7f-1, let-7f-2, let-7g, let-7i, miR-100, miR-101, miR-126, miR-142-3p, miR-143, miR-145, miR-192, miR-200c, miR-21, miR-214, miR-215, miR-22, miR-25, miR-302a, miR-320, miR-320a, miR-34a, miR-34c, miR-365, miR-373, miR-424, miR-429, miR-455, miR-484, miR-502, miR-503, miR-93, miR-98, miR-186, miR-30a-5p, miR-627, let-7a, miR-1, miR-124, miR-125a, miR-129, miR-1295b-3p, miR-1307, miR-130b, miR-132, miR-133a, miR-133b, miR-137, miR-138, miR-139, miR-139-5p, miR-140-5p, miR-148a, miR-148b, miR-149, miR-150-5p, miR-154, miR-15a, miR-15b, miR-16, miR-18a, miR-191, miR-193a-5p, miR-194, miR-195, miR-196a, miR-198, miR-199a-5p, miR-203, miR-204-5p, miR-206, miR-212, miR-218, miR-224, miR-24-3p, miR-26b, miR-27a, miR-28-3p, miR-28-5p, miR-29b, miR-30a-3p, miR-30b, miR-328, miR-338-3p, miR-342, miR-345, miR-34a-5p, miR-361-5p, miR-375, miR-378, miR-378a-3p, miR-378a-5p, miR-409-3p, miR-422a, miR-4487, miR-483, miR-497, miR-498, miR-518a-3p, miR-551a, miR-574-5p, miR-625, miR-638, miR-7, miR-96-5p, miR-202-3p, miR-30a, and/or miR-451 inserted into the 5′ UTR or 3′ UTR of one or more viral genes required for viral replication. This oncolytic virus may be used in methods and compositions for treating colon or colorectal cancer.

[0324] In some embodiments, a recombinant oncolytic virus comprises a plurality of copies of one or more miRNA target sequences for miR-101, miR-130a, miR-130b, miR-134, miR-143, miR-145, miR-152, miR-205, miR-223, miR-301a, miR-301b, miR-30c, miR-34a, miR-34c, miR-424, miR-449a, miR-543, and/or miR-34b inserted into the 5′ UTR or 3′ UTR of one or more viral genes required for viral replication. This oncolytic virus may be used in methods and compositions for treating endometrial cancer.

[0325] In some embodiments, a recombinant oncolytic virus comprises a plurality of copies of one or more miRNA target sequences for miR-125b, miR-138, miR-15a, miR-15b, miR-16, miR-16-1, miR-16-1-3p, miR-16-2, miR-181a, miR-181b, miR-195, miR-223, miR-29b, miR-34b, miR-34c, miR-424, miR-10a, miR-146a, miR-150, miR-151, miR-155, miR-2278, miR-26a, miR-30e, miR-31, miR-326, miR-564, miR-27a, let-7b, miR-124a, miR-142-3p, let-7c, miR-17, miR-20a, miR-29a, miR-30c, miR-720, miR-107, miR-342, miR-34a, miR-202, miR-142-5p, miR-29c, miR-145, miR-193b, miR-199a, miR-214, miR-22, miR-137, and/or miR-197 inserted into the 5′ UTR or 3′ UTR of one or more viral genes required for viral replication. This oncolytic virus may be used in methods and compositions for treating hematologic cancer. In some embodiments, the hematologic cancer is leukemia, lymphoma, or myeloma.

[0326] In some embodiments, a recombinant oncolytic virus comprises a plurality of copies of one or more miRNA target sequences for miR-1, miR-145, miR-1826, miR-199a, miR-199a-3p, miR-203, miR-205, miR-497, miR-508-3p, miR-509-3p, let-7a, let-7d, miR-106a*, miR-126, miR-1285, miR-129-3p, miR-1291, miR-133a, miR-135a, miR-138, miR-141, miR-143, miR-182-5p, miR-200a, miR-218, miR-28-5p, miR-30a, miR-30c, miR-30d, miR-34a, miR-378, miR-429, miR-509-5p, miR-646, miR-133b, let-7b, let-7c, miR-200c, miR-204, miR-335, miR-377, and/or miR-506 inserted into the 5′ UTR or 3′ UTR of one or more viral genes required for viral replication. This oncolytic virus may be used in methods and compositions for treating kidney cancer.

[0327] In some embodiments, a recombinant oncolytic virus comprises a plurality of copies of one or more miRNA target sequences for let-7a-1, let-7a-2, let-7a-3, let-7b, let-7c, let-7d, let-7e, let-7f, let-7f-1, let-7f-2, let-7g, let-7i, miR-1, miR-100, miR-101, miR-105, miR-122, miR-122a, miR-1236, miR-124, miR-125b, miR-126, miR-127, miR-1271, miR-128-3p, miR-129-5p, miR-130a, miR-130b, miR-133a, miR-134, miR-137, miR-138, miR-139, miR-139-5p, miR-140-5p, miR-141, miR-142-3p, miR-143, miR-144, miR-145, miR-146a, miR-148a, miR-148b, miR-150-5p, miR-15b, miR-16, miR-181a-5p, miR-185, miR-188-5p, miR-193b, miR-195, miR-195-5p, miR-197, miR-198, miR-199a, miR-199a-5p, miR-199b, miR-199b-5p, miR-200a, miR-200b, miR-200c, miR-202, miR-203, miR-204-3p, miR-205, miR-206, miR-20a, miR-21, miR-21-3p, miR-211, miR-212, miR-214, miR-217, miR-218, miR-219-5p, miR-22, miR-223, miR-26a, miR-26b, miR-29a, miR-29b-1, miR-29b-2, miR-29c, miR-302b, miR-302c, miR-30a, miR-30a-3p, miR-335, miR-338-3p, miR-33a, miR-34a, miR-34b, miR-365, miR-370, miR-372, miR-375, miR-376a, miR-377, miR-422a, miR-424, miR-424-5p, miR-433, miR-4458, miR-448, miR-450a, miR-451, miR-485-5p, miR-486-5p, miR-497, miR-503, miR-506, miR-519d, miR-520a, miR-520b, miR-520c-3p, miR-582-5p, miR-590-5p, miR-610, miR-612, miR-625, miR-637, miR-675, miR-7, miR-877, miR-940, miR-941, miR-98, miR-99a, miR-132, and/or miR-31 inserted into the 5′ UTR or 3′ UTR of one or more viral genes required for viral replication. This oncolytic virus may be used in methods and compositions for treating liver cancer. In some embodiments, the liver cancer is hepatocellular carcinoma.

[0328] In some embodiments, a recombinant oncolytic virus comprises a plurality of copies of one or more miRNA target sequences for miR-143-3p, miR-126-3p, miR-126-5p, miR-1266-3p, miR-6130, miR-6080, miR-511-5p, miR-143-5p, miR-223-5p, miR-199b-5p, miR-199a-3p, miR-199b-3p, miR-451a, miR-142-5p, miR-144, miR-150-5p, miR-142-3p, miR-214-3p, miR-214-5p, miR-199a-5p, miR-145-3p, miR-145-5p, miR-1297, miR-141, miR-145, miR-16, miR-200a, miR-200b, miR-200c, miR-29b, miR-381, miR-409-3p, miR-429, miR-451, miR-511, miR-99a, let-7a-1, let-7a-2, let-7a-3, let-7b, let-7c, let-7d, let-7e, let-7f-1, let-7f-2, let-7g, let-7i, miR-1, miR-101, miR-133b, miR-138, miR-142-5p, miR-144, miR-1469, miR-146a, miR-153, miR-15a, miR-15b, miR-16-1, miR-16-2, miR-182, miR-192, miR-193a-3p, miR-194, miR-195, miR-198, miR-203, miR-217, miR-218, miR-22, miR-223, miR-26a, miR-26b, miR-29c, miR-33a, miR-34a, miR-34b, miR-34c, miR-365, miR-449a, miR-449b, miR-486-5p, miR-545, miR-610, miR-614, miR-630, miR-660, miR-7515, miR-9500, miR-98, miR-99b, miR-133a, let-7a, miR-100, miR-106a, miR-107, miR-124, miR-125a-3p, miR-125a-5p, miR-126, miR-126*, miR-129, miR-137, miR-140, miR-143, miR-146b, miR-148a, miR-148b, miR-149, miR-152, miR-154, miR-155, miR-17-5p, miR-181a-1, miR-181a-2, miR-181b, miR-181b-1, miR-181b-2, miR-181c, miR-181d, miR-184, miR-186, miR-193b, miR-199a, miR-204, miR-212, miR-221, miR-224, miR-27a, miR-27b, miR-29a, miR-30a, miR-30b, miR-30c, miR-30d, miR-30d-5p, miR-30e-5p, miR-32, miR-335, miR-338-3p, miR-340, miR-342-3p, miR-361-3p, miR-373, miR-375, miR-4500, miR-4782-3p, miR-497, miR-503, miR-512-3p, miR-520a-3p, miR-526b, miR-625*, and/or miR-96 inserted into the 5′ UTR or 3′ UTR of one or more viral genes required for viral replication. This oncolytic virus may be used in methods and compositions for treating lung cancer.

[0329] In some embodiments, a recombinant oncolytic virus comprises a plurality of copies of one or more miRNA target sequences for let-7b, miR-101, miR-125b, miR-1280, miR-143, miR-146a, miR-146b, miR-155, miR-17, miR-184, miR-185, miR-18b, miR-193b, miR-200c, miR-203, miR-204, miR-205, miR-206, miR-20a, miR-211, miR-218, miR-26a, miR-31, miR-33a, miR-34a, miR-34c, miR-376a, miR-376c, miR-573, miR-7-5p, miR-9, and/or miR-98 inserted into the 5′ UTR or 3′ UTR of one or more viral genes required for viral replication. This oncolytic virus may be used in methods and compositions for treating melanoma.

[0330] In some embodiments, a recombinant oncolytic virus comprises a plurality of copies of one or more miRNA target sequences for let-7d, miR-218, miR-34a, miR-375, miR-494, miR-100, miR-124, miR-1250, miR-125b, miR-126, miR-1271, miR-136, miR-138, miR-145, miR-147, miR-148a, miR-181a, miR-206, miR-220a, miR-26a, miR-26b, miR-29a, miR-32, miR-323-5p, miR-329, miR-338, miR-370, miR-410, miR-429, miR-433, miR-499a-5p, miR-503, miR-506, miR-632, miR-646, miR-668, miR-877, and/or miR-9inserted into the 5′ UTR or 3′ UTR of one or more viral genes required for viral replication. This oncolytic virus may be used in methods and compositions for treating oral cancer.

[0331] In some embodiments, a recombinant oncolytic virus comprises a plurality of copies of one or more miRNA target sequences for let-7i, miR-100, miR-124, miR-125b, miR-129-5p, miR-130b, miR-133a, miR-137, miR-138, miR-141, miR-145, miR-148a, miR-152, miR-153, miR-155, miR-199a, miR-200a, miR-200b, miR-200c, miR-212, miR-335, miR-34a, miR-34b, miR-34c, miR-409-3p, miR-411, miR-429, miR-432, miR-449a, miR-494, miR-497, miR-498, miR-519d, miR-655, miR-9, miR-98, miR-101, miR-532-5p, miR-124a, miR-192, miR-193a, and/or miR-7 inserted into the 5′ UTR or 3′ UTR of one or more viral genes required for viral replication. This oncolytic virus may be used in methods and compositions for treating ovarian cancer.

[0332] In some embodiments, a recombinant oncolytic virus comprises a plurality of copies of one or more miRNA target sequences for miR-216a-5p, miR-802, miR-217, miR-145-3p, miR-143-3p, miR-451a, miR-375, miR-214-3p, miR-216b-3p, miR-432-5p, miR-216a-3p, miR-199b-5p, miR-199a-5p, miR-136-3p, miR-216b-5p, miR-136-5p, miR-145-5p, miR-127-3p, miR-199a-3p, miR-199b-3p, miR-559, miR-129-2-3p, miR-4507, miR-1-3p, miR-148a-3p, miR-101, miR-1181, miR-124, miR-1247, miR-133a, miR-141, miR-145, miR-146a, miR-148a, miR-148b, miR-150*, miR-150-5p, miR-152, miR-15a, miR-198, miR-203, miR-214, miR-216a, miR-29c, miR-335, miR-34a, miR-34b, miR-34c, miR-373, miR-375, miR-410, miR-497, miR-615-5p, miR-630, miR-96, miR-132, let-7a, let-7a-1, let-7a-2, let-7a-3, let-7b, let-7c, let-7d, let-7e, let-7f-1, let-7f-2, let-7g, let-7i, miR-126, miR-135a, miR-143, miR-144, miR-150, miR-16, miR-200a, miR-200b, miR-200c, miR-217, miR-218, miR-337, miR-494, and/or miR-98 inserted into the 5′ UTR or 3′ UTR of one or more viral genes required for viral replication. This oncolytic virus may be used in methods and compositions for treating pancreatic cancer.

[0333] In some embodiments, a recombinant oncolytic virus comprises a plurality of copies of one or more miRNA target sequences for let-7a-3p, let-7c, miR-100, miR-101, miR-105, miR-124, miR-128, miR-1296, miR-130b, miR-133a-1, miR-133a-2, miR-133b, miR-135a, miR-143, miR-145, miR-146a, miR-154, miR-15a, miR-187, miR-188-5p, miR-199b, miR-200b, miR-203, miR-205, miR-212, miR-218, miR-221, miR-224, miR-23a, miR-23b, miR-25, miR-26a, miR-26b, miR-29b, miR-302a, miR-30a, miR-30b, miR-30c-1, miR-30c-2, miR-30d, miR-30e, miR-31, miR-330, miR-331-3p, miR-34a, miR-34b, miR-34c, miR-374b, miR-449a, miR-4723-5p, miR-497, miR-628-5p, miR-642a-5p, miR-765, and/or miR-940 inserted into the 5′ UTR or 3′ UTR of one or more viral genes required for viral replication. This oncolytic virus may be used in methods and compositions for treating prostate cancer.

[0334] In some embodiments, a recombinant oncolytic virus comprises a plurality of copies of one or more miRNA target sequences for miR-101, miR-183, miR-204, miR-34a, miR-365b-3p, miR-486-3p, and/or miR-532-5p inserted into the 5′ UTR or 3′ UTR of one or more viral genes required for viral replication. This oncolytic virus may be used in methods and compositions for treating retinoblastoma.

[0335] In some embodiments, an oncolytic virus described herein is a herpes simplex virus and wherein the one or more viral genes required for viral replication is selected from the group consisting of UL1, UL5, UL6, UL7, UL8, UL9, UL11, UL12, UL14, UL15, UL17, UL18, UL19, UL20, UL22, UL25, UL26, UL26.5, UL27, UL28, UL29, UL30, UL31, UL32, UL33, UL34, UL35, UL36, UL37, UL38, UL39, UL40, UL42, UL48, UL49, UL52, UL53, UL54, ICP0, ICP4, ICP22, ICP27, ICP47, gamma-34.5, US3, US4, US5, US6, US7, US8, US9, US10, US11, and US12.

### Payload Molecules

[0336] In some embodiments, the oncolytic viruses described herein comprise a polynucleotide encoding a payload molecule. As used herein, a “payload molecule” refers to a molecule capable of further enhancing the therapeutic efficacy of a virus. Payload molecules suitable for use in the present disclosure include antigen-binding molecules such as antibodies or antigen binding fragments thereof, cytokines, chemokines, soluble receptors, cell-surface receptor ligands, bipartite peptides, enzymes, and nucleic acids (e.g., shRNAs, siRNAs, antisense RNAs, antagomirs, ribozymes, apatamers, a decoy oligonucleotide, or an antagomir). The nature of the payload molecule will vary with the disease type and desired therapeutic outcome. In some embodiments, one or more miRNA target sequences is incorporated in to the 3′ or 5′ UTR of a polynucleotide sequence encoding a payload molecule. In such embodiments, translation and subsequent expression of the payload does not occur, or is substantially reduced, in cells where the corresponding miRNA is expressed. In some embodiments, one or more miRNA target sequences are inserted into the 3′ and/or 5′ UTR of the polynucleotide sequence encoding the therapeutic polypeptide.

[0337] In some embodiments, the payload molecules comprise or consist of payload proteins.

[0338] In some embodiments, the oncolytic viruses of the disclosure comprise one or more polynucleotides encoding one or more payload proteins comprising HPGD, ADA2, HYAL1, CHP, CCL21, IL-12, anti-CD47, anti-TGFβ, anti-PD1, anti-TREM2, CTX-BiTE, or any combinations thereof. In some embodiments, the one or more payload molecules comprise 15-hydroxyprostaglandin dehydrogenase [NAD(+)] (HPGD). In some embodiments, the one or more payload molecules comprise Adenosine deaminase 2 (ADA2). In some embodiments, the one or more payload molecules comprise Hyaluronidase-1 (HYAL1). In some embodiments, the one or more payload molecules comprise Chemotaxis inhibitory protein (CHP). In some embodiments, the one or more payload molecules comprise C-C motif chemokine 21 (CCL21). In some embodiments, the one or more payload molecules comprise Interleukin-12 (IL-12). In some embodiments, the one or more payload molecules comprise a chlorotoxin bispecific T-cell engager (CTX-BiTE). In some embodiments, the one or more payload molecules comprise a CD47 antagonist (anti-CD47). In some embodiments, the one or more payload molecules comprise a TGFβ antagonist (anti-TGFβ). In some embodiments, the one or more payload molecules comprise a PD-1 antagonist (anti-PD1). In some embodiments, the one or more payload molecules comprise a TREM2 (Triggering receptor expressed on myeloid cells 2) antagonist (anti-TREM2).

[0339] As used herein, the term “antagonist” refers to a molecule that is capable of binding to a target protein and either partially or completely blocks, inhibits, reduces, or neutralizes the activity of the target protein. Non-limiting examples of antagonists include antibodies or antigen binding fragments thereof, aptamers, peptides, and designed ankyrin repeat proteins (DARPins). In some embodiments, the antagonist is an antibody or antigen binding fragment thereof that binds to and inhibit the target protein. In some embodiments, the antibody or antigen binding fragment thereof comprises a full-length immunoglobulin, an scFv, a Fab, a Fab′, an F(ab′)2, an Fv, a diabody, a triabody, a minibody, a single-domain antibody (e.g., VHH), a nanobody, or a multispecific antibody.

[0340] In some embodiments, the one or more payload molecules comprise 15-hydroxyprostaglandin dehydrogenase [NAD(+)] (HPGD). Exemplary polypeptide sequences of HPGD can be found in Uniprot Accession Nos. P15428 (for human) and Q8VCCI (for mouse). In some embodiments, the HPGD polypeptide comprises, consists essentially of, or consists of an amino acid sequence that is at least 70%, at least 75%, at least 80%, at least 85%, at least 90%, at least 95%, at least 97%, at least 98%, or at least 99% identical to the sequence of SEQ ID NO: 875. In some embodiments, the HPGD polypeptide comprises, consists essentially of, or consists of the amino acid sequence of SEQ ID NO: 875. In some embodiments, the HPGD polypeptide comprises, consists essentially of, or consists of an amino acid sequence that is at least 70%, at least 75%, at least 80%, at least 85%, at least 90%, at least 95%, at least 97%, at least 98%, or at least 99% identical to the sequence of SEQ ID NO: 876. In some embodiments, the HPGD polypeptide comprises, consists essentially of, or consists of the amino acid sequence of SEQ ID NO: 876.

[0341] In some embodiments, the one or more payload molecules comprise Adenosine deaminase 2 (ADA2). Exemplary polypeptide sequence of ADA2 can be found in Uniprot Accession No. Q9NZK5 (for human). In some embodiments, the ADA2 polypeptide comprises, consists essentially of, or consists of an amino acid sequence that is at least 70%, at least 75%, at least 80%, at least 85%, at least 90%, at least 95%, at least 97%, at least 98%, or at least 99% identical to the sequence of SEQ ID NO: 877. In some embodiments, the ADA2 polypeptide comprises, consists essentially of, or consists of the amino acid sequence of SEQ ID NO: 877.

[0342] In some embodiments, the one or more payload molecules comprise Hyaluronidase-1 (HYAL1). Exemplary polypeptide sequences of HYAL1 can be found in Uniprot Accession Nos. Q12794 (for human) and Q91ZJ9 (for mouse). In some embodiments, the HYAL1 polypeptide comprises, consists essentially of, or consists of an amino acid sequence that is at least 70%, at least 75%, at least 80%, at least 85%, at least 90%, at least 95%, at least 97%, at least 98%, or at least 99% identical to the sequence of SEQ ID NO: 878. In some embodiments, the HYAL1 polypeptide comprises, consists essentially of, or consists of the amino acid sequence of SEQ ID NO: 878. In some embodiments, the HYAL1 polypeptide comprises, consists essentially of, or consists of an amino acid sequence that is at least 70%, at least 75%, at least 80%, at least 85%, at least 90%, at least 95%, at least 97%, at least 98%, or at least 99% identical to the sequence of SEQ ID NO: 879. In some embodiments, the HYAL1 polypeptide comprises, consists essentially of, or consists of the amino acid sequence of SEQ ID NO: 879.

[0343] In some embodiments, the one or more payload molecules comprise Chemotaxis inhibitory protein (CHP). Exemplary polypeptide sequence of CHP can be found in Uniprot Accession No. A6QIG7 (for Staphylococcus aureus). In some embodiments, the CHP polypeptide comprises, consists essentially of, or consists of an amino acid sequence that is at least 70%, at least 75%, at least 80%, at least 85%, at least 90%, at least 95%, at least 97%, at least 98%, or at least 99% identical to the sequence of SEQ ID NO: 880. In some embodiments, the CHP polypeptide comprises, consists essentially of, or consists of the amino acid sequence of SEQ ID NO: 880.

[0344] In some embodiments, the one or more payload molecules comprise C-C motif chemokine 21 (CCL21). Exemplary polypeptide sequences of CCL21 can be found in Uniprot Accession Nos. 000585 (for human) and P84444 (for mouse). In some embodiments, the CCL21 polypeptide comprises, consists essentially of, or consists of an amino acid sequence that is at least 70%, at least 75%, at least 80%, at least 85%, at least 90%, at least 95%, at least 97%, at least 98%, or at least 99% identical to the sequence of SEQ ID NO: 881. In some embodiments, the CCL21 polypeptide comprises, consists essentially of, or consists of the amino acid sequence of SEQ ID NO: 881. In some embodiments, the CCL21 polypeptide comprises, consists essentially of, or consists of an amino acid sequence that is at least 70%, at least 75%, at least 80%, at least 85%, at least 90%, at least 95%, at least 97%, at least 98%, or at least 99% identical to the sequence of SEQ ID NO: 882. In some embodiments, the CCL21 polypeptide comprises, consists essentially of, or consists of the amino acid sequence of SEQ ID NO: 882.

[0345] In some embodiments, the one or more payload molecules comprise Interleukin-12 (IL-12). IL-12 comprises two disulfide-linked subunits, IL-12 subunit alpha (IL-12a) and IL-12 subunit beta (IL-12b). Exemplary polypeptide sequences of IL-12a can be found in Uniprot Accession Nos. P29459 (for human) and P43431 (for mouse). Exemplary polypeptide sequences of IL-12b can be found in Uniprot Accession Nos. P29460 (for human) and P43432 (for mouse). In some embodiments, the IL-12a polypeptide comprises, consists essentially of, or consists of an amino acid sequence that is at least 70%, at least 75%, at least 80%, at least 85%, at least 90%, at least 95%, at least 97%, at least 98%, or at least 99% identical to the sequence of SEQ ID NO: 883. In some embodiments, the IL-12a polypeptide comprises, consists essentially of, or consists of the amino acid sequence of SEQ ID NO: 883. In some embodiments, the IL-12b polypeptide comprises, consists essentially of, or consists of an amino acid sequence that is at least 70%, at least 75%, at least 80%, at least 85%, at least 90%, at least 95%, at least 97%, at least 98%, or at least 99% identical to the sequence of SEQ ID NO: 884. In some embodiments, the IL-12b polypeptide comprises, consists essentially of, or consists of the amino acid sequence of SEQ ID NO: 884. In some embodiments, the IL-12a polypeptide comprises, consists essentially of, or consists of an amino acid sequence that is at least 70%, at least 75%, at least 80%, at least 85%, at least 90%, at least 95%, at least 97%, at least 98%, or at least 99% identical to the sequence of SEQ ID NO: 885. In some embodiments, the IL-12a polypeptide comprises, consists essentially of, or consists of the amino acid sequence of SEQ ID NO: 885. In some embodiments, the IL-12b polypeptide comprises, consists essentially of, or consists of an amino acid sequence that is at least 70%, at least 75%, at least 80%, at least 85%, at least 90%, at least 95%, at least 97%, at least 98%, or at least 99% identical to the sequence of SEQ ID NO: 886. In some embodiments, the IL-12b polypeptide comprises, consists essentially of, or consists of the amino acid sequence of SEQ ID NO: 886.

[0346] In some embodiments, the one or more payload molecules comprise a CD47 antagonist (anti-CD47). In some embodiments, the anti-CD47 comprises an anti-CD47 antibody or an antigen binding fragment thereof. In some embodiments, the anti-CD47 comprises an anti-CD47 VHH domain. In some embodiments, the anti-CD47 polypeptide comprises, consists essentially of, or consists of an amino acid sequence that is at least 70%, at least 75%, at least 80%, at least 85%, at least 90%, at least 95%, at least 97%, at least 98%, or at least 99% identical to the sequence of SEQ ID NO: 887. In some embodiments, the anti-CD47 polypeptide comprises, consists essentially of, or consists of the amino acid sequence of SEQ ID NO: 887. In some embodiments, the anti-CD47 comprises an anti-CD47 VHH domain and an IgG1-Fc. In some embodiments, the anti-CD47 polypeptide comprises, consists essentially of, or consists of an amino acid sequence that is at least 70%, at least 75%, at least 80%, at least 85%, at least 90%, at least 95%, at least 97%, at least 98%, or at least 99% identical to the sequence of SEQ ID NO: 888. In some embodiments, the anti-CD47 polypeptide comprises, consists essentially of, or consists of the amino acid sequence of SEQ ID NO: 888. In some embodiments, the anti-CD47 is an antibody or antigen binding fragment thereof comprising the complementarity-determining regions (CDRs) of SEQ ID NO: 888. In some embodiments, the anti-CD47 antibody or antigen binding fragment thereof comprises heavy chain variable domain or VHH domain CDRs of:

CDR1:
(SEQ ID NO: 895)
GIIFKIND
CDR2:
(SEQ ID NO: 896)
STGGDEA
CDR3:
(SEQ ID NO: 897)
TAVISTDRDGTE

In some embodiments, the anti-CD47 antibody or antigen binding fragment thereof comprises heavy chain variable domain or VHH domain CDRs having at most 1, at most 2, or at most 3 amino acid mutations in CDR1, CDR2 and/or CDR3 according to SEQ ID NOS: 895-897.

[0347] In some embodiments, the one or more payload molecules comprise a TGFβ antagonist (anti-TGFβ). In some embodiments, the anti-TGFβ comprises an anti-TGFβ antibody or an antigen binding fragment thereof. In some embodiments, the anti-TGFβ comprises an anti-TGFβ scFv domain. In some embodiments, the anti-TGFβ polypeptide comprises, consists essentially of, or consists of an amino acid sequence that is at least 70%, at least 75%, at least 80%, at least 85%, at least 90%, at least 95%, at least 97%, at least 98%, or at least 99% identical to the sequence of SEQ ID NO: 889. In some embodiments, the anti-TGFβ polypeptide comprises, consists essentially of, or consists of the amino acid sequence of SEQ ID NO: 889. In some embodiments, the anti-TGFβ comprises an anti-TGFβ scFv domain and an IgG1-Fc. In some embodiments, the anti-TGFβ polypeptide comprises, consists essentially of, or consists of an amino acid sequence that is at least 70%, at least 75%, at least 80%, at least 85%, at least 90%, at least 95%, at least 97%, at least 98%, or at least 99% identical to the sequence of SEQ ID NO: 890. In some embodiments, the anti-TGFβ polypeptide comprises, consists essentially of, or consists of the amino acid sequence of SEQ ID NO: 890. In some embodiments, the anti-TGFβ is an antibody or antigen binding fragment thereof comprising the complementarity-determining regions (CDRs) of SEQ ID NO: 890. In some embodiments, the anti-TGFβ antibody or antigen binding fragment thereof comprises heavy chain variable domain CDRs of:

CDR1:
(SEQ ID NO: 898)
GYTFSSNV
CDR2:
(SEQ ID NO: 899)
MGGVIPIVDIAN
CDR3:
(SEQ ID NO: 900)
ASTLGLVLDAMDY

In some embodiments, the anti-TGFβ antibody or antigen binding fragment thereof comprises heavy chain variable domain CDRs having at most 1, at most 2, or at most 3 amino acid mutations in CDR1, CDR2 and/or CDR3 according to SEQ ID NOS: 898-900. In some embodiments, the anti-TGFβ antibody or antigen binding fragment thereof comprises light chain variable domain CDRs of:

CDR1
(SEQ ID NO: 901)
QSLGSSYLA
CDR2
(SEQ ID NO: 902)
GASSRAP
CDR3
(SEQ ID NO: 903)
QQYADSPIT

In some embodiments, the anti-TGFβ antibody or antigen binding fragment thereof comprises light chain variable domain CDRs having at most 1, at most 2, or at most 3 amino acid mutations in CDR1, CDR2 and/or CDR3 according to SEQ ID NOS: 901-903.

[0348] In some embodiments, the one or more payload molecules comprise a PD-1 antagonist (anti-PD1). In some embodiments, the anti-PD1 comprises an anti-PD1 antibody or an antigen binding fragment thereof. In some embodiments, the anti-PD1 comprises an anti-PD1 VHH domain. In some embodiments, the anti-PD1 polypeptide comprises, consists essentially of, or consists of an amino acid sequence that is at least 70%, at least 75%, at least 80%, at least 85%, at least 90%, at least 95%, at least 97%, at least 98%, or at least 99% identical to the sequence of SEQ ID NO: 891. In some embodiments, the anti-PD1 polypeptide comprises, consists essentially of, or consists of the amino acid sequence of SEQ ID NO: 891. In some embodiments, the anti-PD1 comprises an anti-PD1 VHH domain and an IgG1-Fc. In some embodiments, the anti-PD1 polypeptide comprises, consists essentially of, or consists of an amino acid sequence that is at least 70%, at least 75%, at least 80%, at least 85%, at least 90%, at least 95%, at least 97%, at least 98%, or at least 99% identical to the sequence of SEQ ID NO: 892. In some embodiments, the anti-PD1 polypeptide comprises, consists essentially of, or consists of the amino acid sequence of SEQ ID NO: 892. In some embodiments, the anti-PD1 is an antibody or antigen binding fragment thereof comprising the complementarity-determining regions (CDRs) of SEQ ID NO: 892. In some embodiments, the anti-PD1 antibody or antigen binding fragment thereof comprises heavy chain variable domain or VHH domain CDRs of:

CDR1:
(SEQ ID NO: 904)
DSIDSLVN
CDR2:
(SEQ ID NO: 905)
IATYITHY
CDR3:
(SEQ ID NO: 906)
YARNIIVDY

In some embodiments, the anti-PD1 antibody or antigen binding fragment thereof comprises heavy chain variable domain or VHH domain CDRs having at most 1, at most 2, or at most 3 amino acid mutations in CDR1, CDR2 and/or CDR3 according to SEQ ID NOS: 904-906.

[0349] In some embodiments, the one or more payload molecules comprise a TREM2 antagonist (anti-TREM2). In some embodiments, the anti-TREM2 comprises an anti-TREM2 antibody or an antigen binding fragment thereof. In some embodiments, the anti-TREM2 antibody heavy chain polypeptide comprises, consists essentially of, or consists of an amino acid sequence that is at least 70%, at least 75%, at least 80%, at least 85%, at least 90%, at least 95%, at least 97%, at least 98%, or at least 99% identical to the sequence of SEQ ID NO: 893. In some embodiments, the anti-TREM2 antibody heavy chain polypeptide comprises, consists essentially of, or consists of the amino acid sequence of SEQ ID NO: 893. In some embodiments, the anti-TREM2 antibody light chain polypeptide comprises, consists essentially of, or consists of an amino acid sequence that is at least 70%, at least 75%, at least 80%, at least 85%, at least 90%, at least 95%, at least 97%, at least 98%, or at least 99% identical to the sequence of SEQ ID NO: 894. In some embodiments, the anti-TREM2 antibody light chain polypeptide comprises, consists essentially of, or consists of the amino acid sequence of SEQ ID NO: 894. In some embodiments, the anti-TREM2 is an antibody or antigen binding fragment thereof comprising the complementarity-determining regions (CDRs) of SEQ ID NOs: 893 and 894. In some embodiments, the anti-TREM2 antibody or antigen binding fragment thereof comprises heavy chain variable domain CDRs of:

CDR1:
(SEQ ID NO: 907)
GYTFTDYA
CDR2:
(SEQ ID NO: 908)
ISTYSSNT
CDR3:
(SEQ ID NO: 909)
ARDDGHYVYAMDY

In some embodiments, the anti-TREM2 antibody or antigen binding fragment thereof comprises heavy chain variable domain CDRs having at most 1, at most 2, or at most 3 amino acid mutations in CDR1, CDR2 and/or CDR3 according to SEQ ID NOS: 907-909. In some embodiments, the anti-TREM2 antibody or antigen binding fragment thereof comprises light chain variable domain CDRs of:

CDR1
(SEQ ID NO: 910)
KSLLNSDGFTY
CDR2
(SEQ ID NO: 911)
LVS
CDR3
(SEQ ID NO: 912)
FQSNYLYT

In some embodiments, the anti-TREM2 antibody or antigen binding fragment thereof comprises light chain variable domain CDRs having at most 1, at most 2, or at most 3 amino acid mutations in CDR1, CDR2 and/or CDR3 according to SEQ ID NOS: 910-912.

[0350] In some embodiments, the one or more payload molecules comprise a biomolecule comprising a chlorotoxin (CTX). In some embodiments, the CTX is a scorpion CTX. In some embodiments, the CTX polypeptide comprises, consists essentially of, or consists of an amino acid sequence that is at least 70%, at least 75%, at least 80%, at least 85%, at least 90%, at least 95%, at least 97%, at least 98%, or at least 99% identical to the sequence of SEQ ID NO: 913. In some embodiments, the CTX polypeptide comprises, consists essentially of, or consists of the amino acid sequence of SEQ ID NO: 913. In some embodiments, the CTX blocks small-conductance chloride channels and binds preferentially to glioma cells. In some embodiments, the biomolecule comprising CTX also comprises an antibody fragment. In some embodiments, the biomolecule comprising CTX also comprises an Fc domain (i.e., CTX-Fc). In some embodiments, the biomolecule comprising CTX also comprises a T-cell engager moiety. In some embodiments, the T-cell engager moiety specifically binds to a protein expressed on the surface of the T-cell. In some embodiments, the T-cell engager moiety specifically binds to CD3. In some embodiments, the CD3-binding T-cell engager moiety comprises, consists essentially of, or consists of an amino acid sequence that is at least 70%, at least 75%, at least 80%, at least 85%, at least 90%, at least 95%, at least 97%, at least 98%, or at least 99% identical to the sequence of SEQ ID NO: 914. In some embodiments, the CD3-binding T-cell engager moiety comprises, consists essentially of, or consists of the amino acid sequence of SEQ ID NO: 914. Because CTX binds to chloride channels on the glioma cells, the biomolecule comprising CTX and the T-cell engager moiety is a bispecific T-cell engager (BiTE) (i.e., CTX-BiTE). In some embodiments, the CTX-BiTE comprises, consists essentially of, or consists of an amino acid sequence that is at least 70%, at least 75%, at least 80%, at least 85%, at least 90%, at least 95%, at least 97%, at least 98%, or at least 99% identical to the sequence of SEQ ID NO: 915. In some embodiments, the CTX-BiTE comprises, consists essentially of, or consists of the amino acid sequence of SEQ ID NO: 915. In some embodiments, the CTX-BiTE comprises, consists essentially of, or consists of an amino acid sequence that is at least 70%, at least 75%, at least 80%, at least 85%, at least 90%, at least 95%, at least 97%, at least 98%, or at least 99% identical to the sequence of SEQ ID NO: 916. In some embodiments, the CTX-BiTE comprises, consists essentially of, or consists of the amino acid sequence of SEQ ID NO: 916.

[0351] In some embodiments, the oncolytic viruses of the disclosure comprise one or more polynucleotides encoding two or more payload molecules comprising any of the combinations listed in Table 4 below.

TABLE 4
Combination of Two Payload Molecules

| Combo # | Payload Molecules |
|---|---|
| 1 | HPGD, ADA2 |
| 2 | HPGD, HYAL1 |
| 3 | HPGD, CHP |
| 4 | HPGD, CCL21 |
| 5 | HPGD, IL-12 |
| 6 | HPGD, anti-CD47 |
| 7 | HPGD, anti-TGFβ |
| 8 | HPGD, anti-PD1 |
| 9 | HPGD, anti-TREM2 |
| 10 | ADA2, HYAL1 |
| 11 | ADA2, CHP |
| 12 | ADA2, CCL21 |
| 13 | ADA2, IL-12 |
| 14 | ADA2, anti-CD47 |
| 15 | ADA2, anti-TGFβ |
| 16 | ADA2, anti-PD1 |
| 17 | ADA2, anti-TREM2 |
| 18 | HYAL1, CHP |
| 19 | HYAL1, CCL21 |
| 20 | HYAL1, IL-12 |
| 21 | HYAL1, anti-CD47 |
| 22 | HYAL1, anti-TGFβ |
| 23 | HYAL1, anti-PD1 |
| 24 | HYAL1, anti-TREM2 |
| 25 | CHP, CCL21 |
| 26 | CHP, IL-12 |
| 27 | CHP, anti-CD47 |
| 28 | CHP, anti-TGFβ |
| 29 | CHP, anti-PD1 |
| 30 | CHP, anti-TREM2 |
| 31 | CCL21, IL-12 |
| 32 | CCL21, anti-CD47 |
| 33 | CCL21, anti-TGFβ |
| 34 | CCL21, anti-PD1 |
| 35 | CCL21, anti-TREM2 |
| 36 | IL-12, anti-CD47 |
| 37 | IL-12, anti-TGFβ |
| 38 | IL-12, anti-PD1 |
| 39 | IL-12, anti-TREM2 |
| 40 | anti-CD47, anti-TGFβ |
| 41 | anti-CD47, anti-PD1 |
| 42 | anti-CD47, anti-TREM2 |
| 43 | anti-TGFβ, anti-PD1 |
| 44 | anti-TGFβ, anti-TREM2 |
| 45 | anti-PD1, anti-TREM2 |
| 46 | CTX-BiTE, ADA2 |
| 47 | CTX-BiTE, HYAL1 |
| 48 | CTX-BiTE, CHP |
| 49 | CTX-BiTE, CCL21 |
| 50 | CTX-BiTE, IL-12 |
| 51 | CTX-BiTE, anti-CD47 |
| 52 | CTX-BiTE, anti-TGFβ |
| 53 | CTX-BiTE, anti-PD1 |
| 54 | CTX-BiTE, anti-TREM2 |
| 55 | CTX-BiTE, HPGD |

[0352] In some embodiments, the oncolytic viruses of the disclosure comprise one or more polynucleotides encoding three or more payload molecules comprising any of the combinations listed in Table 5 below.

TABLE 5
Combination of Three Payload Molecules

| Combo # | Payload Molecules |
|---|---|
| 1 | HPGD, ADA2, HYAL1 |
| 2 | HPGD, ADA2, CHP |
| 3 | HPGD, ADA2, CCL21 |
| 4 | HPGD, ADA2, IL-12 |
| 5 | HPGD, ADA2, anti-CD47 |
| 6 | HPGD, ADA2, anti-TGFβ |
| 7 | HPGD, ADA2, anti-PD1 |
| 8 | HPGD, ADA2, anti-TREM2 |
| 9 | HPGD, HYAL1, CHP |
| 10 | HPGD, HYAL1, CCL21 |
| 11 | HPGD, HYAL1, IL-12 |
| 12 | HPGD, HYAL1, anti-CD47 |
| 13 | HPGD, HYAL1, anti-TGFβ |
| 14 | HPGD, HYAL1, anti-PD1 |
| 15 | HPGD, HYAL1, anti-TREM2 |
| 16 | HPGD, CHP, CCL21 |
| 17 | HPGD, CHP, IL-12 |
| 18 | HPGD, CHP, anti-CD47 |
| 19 | HPGD, CHP, anti-TGFβ |
| 20 | HPGD, CHP, anti-PD1 |
| 21 | HPGD, CHP, anti-TREM2 |
| 22 | HPGD, CCL21, IL-12 |
| 23 | HPGD, CCL21, anti-CD47 |
| 24 | HPGD, CCL21, anti-TGFβ |
| 25 | HPGD, CCL21, anti-PD1 |
| 26 | HPGD, CCL21, anti-TREM2 |
| 27 | HPGD, IL-12, anti-CD47 |
| 28 | HPGD, IL-12, anti-TGFβ |
| 29 | HPGD, IL-12, anti-PD1 |
| 30 | HPGD, IL-12, anti-TREM2 |
| 31 | HPGD, anti-CD47, anti-TGFβ |
| 32 | HPGD, anti-CD47, anti-PD1 |
| 33 | HPGD, anti-CD47, anti-TREM2 |
| 34 | HPGD, anti-TGFβ, anti-PD1 |
| 35 | HPGD, anti-TGFβ, anti-TREM2 |
| 36 | HPGD, anti-PD1, anti-TREM2 |
| 37 | ADA2, HYAL1, CHP |
| 38 | ADA2, HYAL1, CCL21 |
| 39 | ADA2, HYAL1, IL-12 |
| 40 | ADA2, HYAL1, anti-CD47 |
| 41 | ADA2, HYAL1, anti-TGFβ |
| 42 | ADA2, HYAL1, anti-PD1 |
| 43 | ADA2, HYAL1, anti-TREM2 |
| 44 | ADA2, CHP, CCL21 |
| 45 | ADA2, CHP, IL-12 |
| 46 | ADA2, CHP, anti-CD47 |
| 47 | ADA2, CHP, anti-TGFβ |
| 48 | ADA2, CHP, anti-PD1 |
| 49 | ADA2, CHP, anti-TREM2 |
| 50 | ADA2, CCL21, IL-12 |
| 51 | ADA2, CCL21, anti-CD47 |
| 52 | ADA2, CCL21, anti-TGFβ |
| 53 | ADA2, CCL21, anti-PD1 |
| 54 | ADA2, CCL21, anti-TREM2 |
| 55 | ADA2, IL-12, anti-CD47 |
| 56 | ADA2, IL-12, anti-TGFβ |
| 57 | ADA2, IL-12, anti-PD1 |
| 58 | ADA2, IL-12, anti-TREM2 |
| 59 | ADA2, anti-CD47, anti-TGFβ |
| 60 | ADA2, anti-CD47, anti-PD1 |
| 61 | ADA2, anti-CD47, anti-TREM2 |
| 62 | ADA2, anti-TGFβ, anti-PD1 |
| 63 | ADA2, anti-TGFβ, anti-TREM2 |
| 64 | ADA2, anti-PD1, anti-TREM2 |
| 65 | HYAL1, CHP, CCL21 |
| 66 | HYAL1, CHP, IL-12 |
| 67 | HYAL1, CHP, anti-CD47 |
| 68 | HYAL1, CHP, anti-TGFβ |
| 69 | HYAL1, CHP, anti-PD1 |
| 70 | HYAL1, CHP, anti-TREM2 |
| 71 | HYAL1, CCL21, IL-12 |
| 72 | HYAL1, CCL21, anti-CD47 |
| 73 | HYAL1, CCL21, anti-TGFβ |
| 74 | HYAL1, CCL21, anti-PD1 |
| 75 | HYAL1, CCL21, anti-TREM2 |
| 76 | HYAL1, IL-12, anti-CD47 |
| 77 | HYAL1, IL-12, anti-TGFβ |
| 78 | HYAL1, IL-12, anti-PD1 |
| 79 | HYAL1, IL-12, anti-TREM2 |
| 80 | HYAL1, anti-CD47, anti-TGFβ |
| 81 | HYAL1, anti-CD47, anti-PD1 |
| 82 | HYAL1, anti-CD47, anti-TREM2 |
| 83 | HYAL1, anti-TGFβ, anti-PD1 |
| 84 | HYAL1, anti-TGFβ, anti-TREM2 |
| 85 | HYAL1, anti-PD1, anti-TREM2 |
| 86 | CHP, CCL21, IL-12 |
| 87 | CHP, CCL21, anti-CD47 |
| 88 | CHP, CCL21, anti-TGFβ |
| 89 | CHP, CCL21, anti-PD1 |
| 90 | CHP, CCL21, anti-TREM2 |
| 91 | CHP, IL-12, anti-CD47 |
| 92 | CHP, IL-12, anti-TGFβ |
| 93 | CHP, IL-12, anti-PD1 |
| 94 | CHP, IL-12, anti-TREM2 |
| 95 | CHP, anti-CD47, anti-TGFβ |
| 96 | CHP, anti-CD47, anti-PD1 |
| 97 | CHP, anti-CD47, anti-TREM2 |
| 98 | CHP, anti-TGFβ, anti-PD1 |
| 99 | CHP, anti-TGFβ, anti-TREM2 |
| 100 | CHP, anti-PD1, anti-TREM2 |
| 101 | CCL21, IL-12, anti-CD47 |
| 102 | CCL21, IL-12, anti-TGFβ |
| 103 | CCL21, IL-12, anti-PD1 |
| 104 | CCL21, IL-12, anti-TREM2 |
| 105 | CCL21, anti-CD47, anti-TGFβ |
| 106 | CCL21, anti-CD47, anti-PD1 |
| 107 | CCL21, anti-CD47, anti-TREM2 |
| 108 | CCL21, anti-TGFβ, anti-PD1 |
| 109 | CCL21, anti-TGFβ, anti-TREM2 |
| 110 | CCL21, anti-PD1, anti-TREM2 |
| 111 | IL-12, anti-CD47, anti-TGFβ |
| 112 | IL-12, anti-CD47, anti-PD1 |
| 113 | IL-12, anti-CD47, anti-TREM2 |
| 114 | IL-12, anti-TGFβ, anti-PD1 |
| 115 | IL-12, anti-TGFβ, anti-TREM2 |
| 116 | IL-12, anti-PD1, anti-TREM2 |
| 117 | anti-CD47, anti-TGFβ, anti-PD1 |
| 118 | anti-CD47, anti-TGFβ, anti-TREM2 |
| 119 | anti-CD47, anti-PD1, anti-TREM2 |
| 120 | anti-TGFβ, anti-PD1, anti-TREM2 |
| 121 | CTX-BiTE, HPGD, ADA2 |
| 122 | CTX-BiTE, HPGD, HYAL1 |
| 123 | CTX-BiTE, HPGD, CHP |
| 124 | CTX-BiTE, HPGD, CCL21 |
| 125 | CTX-BiTE, HPGD, IL-12 |
| 126 | CTX-BiTE, HPGD, anti-CD47 |
| 127 | CTX-BiTE, HPGD, anti-TGFβ |
| 128 | CTX-BiTE, HPGD, anti-PD1 |
| 129 | CTX-BiTE, HPGD, anti-TREM2 |
| 130 | CTX-BiTE, ADA2, HYAL1 |
| 131 | CTX-BiTE, ADA2, CHP |
| 132 | CTX-BiTE, ADA2, CCL21 |
| 133 | CTX-BiTE, ADA2, IL-12 |
| 134 | CTX-BiTE, ADA2, anti-CD47 |
| 135 | CTX-BiTE, ADA2, anti-TGFβ |
| 136 | CTX-BiTE, ADA2, anti-PD1 |
| 137 | CTX-BiTE, ADA2, anti-TREM2 |
| 138 | CTX-BiTE, HYAL1, CHP |
| 139 | CTX-BiTE, HYAL1, CCL21 |
| 140 | CTX-BiTE, HYAL1, IL-12 |
| 141 | CTX-BiTE, HYAL1, anti-CD47 |
| 142 | CTX-BiTE, HYAL1, anti-TGFβ |
| 143 | CTX-BiTE, HYAL1, anti-PD1 |
| 144 | CTX-BiTE, HYAL1, anti-TREM2 |
| 145 | CTX-BiTE, CHP, CCL21 |
| 146 | CTX-BiTE, CHP, IL-12 |
| 147 | CTX-BiTE, CHP, anti-CD47 |
| 148 | CTX-BiTE, CHP, anti-TGFβ |
| 149 | CTX-BiTE, CHP, anti-PD1 |
| 150 | CTX-BiTE, CHP, anti-TREM2 |
| 151 | CTX-BiTE, CCL21, IL-12 |
| 152 | CTX-BiTE, CCL21, anti-CD47 |
| 153 | CTX-BiTE, CCL21, anti-TGFβ |
| 154 | CTX-BiTE, CCL21, anti-PD1 |
| 155 | CTX-BiTE, CCL21, anti-TREM2 |
| 156 | CTX-BiTE, IL-12, anti-CD47 |
| 157 | CTX-BiTE, IL-12, anti-TGFβ |
| 158 | CTX-BiTE, IL-12, anti-PD1 |
| 159 | CTX-BiTE, IL-12, anti-TREM2 |
| 160 | CTX-BiTE, anti-CD47, anti-TGFβ |
| 161 | CTX-BiTE, anti-CD47, anti-PD1 |
| 162 | CTX-BiTE, anti-CD47, anti-TREM2 |
| 163 | CTX-BiTE, anti-TGFβ, anti-PD1 |
| 164 | CTX-BiTE, anti-TGFβ, anti-TREM2 |
| 165 | CTX-BiTE, anti-PD1, anti-TREM2 |

[0353] In some embodiments, the oncolytic viruses of the disclosure comprise one or more polynucleotides encoding four or more payload molecules comprising any of the combinations listed in Table 6 below.

TABLE 6
Combination of Four Payload Molecules

| Combo # | Payload Molecules |
|---|---|
| 1 | HPGD, ADA2, HYAL1, CHP |
| 2 | HPGD, ADA2, HYAL1, CCL21 |
| 3 | HPGD, ADA2, HYAL1, IL-12 |
| 4 | HPGD, ADA2, HYAL1, anti-CD47 |
| 5 | HPGD, ADA2, HYAL1, anti-TGFβ |
| 6 | HPGD, ADA2, HYAL1, anti-PD1 |
| 7 | HPGD, ADA2, HYAL1, anti-TREM2 |
| 8 | HPGD, ADA2, CHP, CCL21 |
| 9 | HPGD, ADA2, CHP, IL-12 |
| 10 | HPGD, ADA2, CHP, anti-CD47 |
| 11 | HPGD, ADA2, CHP, anti-TGFβ |
| 12 | HPGD, ADA2, CHP, anti-PD1 |
| 13 | HPGD, ADA2, CHP, anti-TREM2 |
| 14 | HPGD, ADA2, CCL21, IL-12 |
| 15 | HPGD, ADA2, CCL21, anti-CD47 |
| 16 | HPGD, ADA2, CCL21, anti-TGFβ |
| 17 | HPGD, ADA2, CCL21, anti-PD1 |
| 18 | HPGD, ADA2, CCL21, anti-TREM2 |
| 19 | HPGD, ADA2, IL-12, anti-CD47 |
| 20 | HPGD, ADA2, IL-12, anti-TGFβ |
| 21 | HPGD, ADA2, IL-12, anti-PD1 |
| 22 | HPGD, ADA2, IL-12, anti-TREM2 |
| 23 | HPGD, ADA2, anti-CD47, anti-TGFβ |
| 24 | HPGD, ADA2, anti-CD47, anti-PD1 |
| 25 | HPGD, ADA2, anti-CD47, anti-TREM2 |
| 26 | HPGD, ADA2, anti-TGFβ, anti-PD1 |
| 27 | HPGD, ADA2, anti-TGFβ, anti-TREM2 |
| 28 | HPGD, ADA2, anti-PD1, anti-TREM2 |
| 29 | HPGD, HYAL1, CHP, CCL21 |
| 30 | HPGD, HYAL1, CHP, IL-12 |
| 31 | HPGD, HYAL1, CHP, anti-CD47 |
| 32 | HPGD, HYAL1, CHP, anti-TGFβ |
| 33 | HPGD, HYAL1, CHP, anti-PD1 |
| 34 | HPGD, HYAL1, CHP, anti-TREM2 |
| 35 | HPGD, HYAL1, CCL21, IL-12 |
| 36 | HPGD, HYAL1, CCL21, anti-CD47 |
| 37 | HPGD, HYAL1, CCL21, anti-TGFβ |
| 38 | HPGD, HYAL1, CCL21, anti-PD1 |
| 39 | HPGD, HYAL1, CCL21, anti-TREM2 |
| 40 | HPGD, HYAL1, IL-12, anti-CD47 |
| 41 | HPGD, HYAL1, IL-12, anti-TGFβ |
| 42 | HPGD, HYAL1, IL-12, anti-PD1 |
| 43 | HPGD, HYAL1, IL-12, anti-TREM2 |
| 44 | HPGD, HYAL1, anti-CD47, anti-TGFβ |
| 45 | HPGD, HYAL1, anti-CD47, anti-PD1 |
| 46 | HPGD, HYAL1, anti-CD47, anti-TREM2 |
| 47 | HPGD, HYAL1, anti-TGFβ, anti-PD1 |
| 48 | HPGD, HYAL1, anti-TGFβ, anti-TREM2 |
| 49 | HPGD, HYAL1, anti-PD1, anti-TREM2 |
| 50 | HPGD, CHP, CCL21, IL-12 |
| 51 | HPGD, CHP, CCL21, anti-CD47 |
| 52 | HPGD, CHP, CCL21, anti-TGFβ |
| 53 | HPGD, CHP, CCL21, anti-PD1 |
| 54 | HPGD, CHP, CCL21, anti-TREM2 |
| 55 | HPGD, CHP, IL-12, anti-CD47 |
| 56 | HPGD, CHP, IL-12, anti-TGFβ |
| 57 | HPGD, CHP, IL-12, anti-PD1 |
| 58 | HPGD, CHP, IL-12, anti-TREM2 |
| 59 | HPGD, CHP, anti-CD47, anti-TGFβ |
| 60 | HPGD, CHP, anti-CD47, anti-PD1 |
| 61 | HPGD, CHP, anti-CD47, anti-TREM2 |
| 62 | HPGD, CHP, anti-TGFβ, anti-PD1 |
| 63 | HPGD, CHP, anti-TGFβ, anti-TREM2 |
| 64 | HPGD, CHP, anti-PD1, anti-TREM2 |
| 65 | HPGD, CCL21, IL-12, anti-CD47 |
| 66 | HPGD, CCL21, IL-12, anti-TGFβ |
| 67 | HPGD, CCL21, IL-12, anti-PD1 |
| 68 | HPGD, CCL21, IL-12, anti-TREM2 |
| 69 | HPGD, CCL21, anti-CD47, anti-TGFβ |
| 70 | HPGD, CCL21, anti-CD47, anti-PD1 |
| 71 | HPGD, CCL21, anti-CD47, anti-TREM2 |
| 72 | HPGD, CCL21, anti-TGFβ, anti-PD1 |
| 73 | HPGD, CCL21, anti-TGFβ, anti-TREM2 |
| 74 | HPGD, CCL21, anti-PD1, anti-TREM2 |
| 75 | HPGD, IL-12, anti-CD47, anti-TGFβ |
| 76 | HPGD, IL-12, anti-CD47, anti-PD1 |
| 77 | HPGD, IL-12, anti-CD47, anti-TREM2 |
| 78 | HPGD, IL-12, anti-TGFβ, anti-PD1 |
| 79 | HPGD, IL-12, anti-TGFβ, anti-TREM2 |
| 80 | HPGD, IL-12, anti-PD1, anti-TREM2 |
| 81 | HPGD, anti-CD47, anti-TGFβ, anti-PD1 |
| 82 | HPGD, anti-CD47, anti-TGFβ, anti-TREM2 |
| 83 | HPGD, anti-CD47, anti-PD1, anti-TREM2 |
| 84 | HPGD, anti-TGFβ, anti-PD1, anti-TREM2 |
| 85 | ADA2, HYAL1, CHP, CCL21 |
| 86 | ADA2, HYAL1, CHP, IL-12 |
| 87 | ADA2, HYAL1, CHP, anti-CD47 |
| 88 | ADA2, HYAL1, CHP, anti-TGFβ |
| 89 | ADA2, HYAL1, CHP, anti-PD1 |
| 90 | ADA2, HYAL1, CHP, anti-TREM2 |
| 91 | ADA2, HYAL1, CCL21, IL-12 |
| 92 | ADA2, HYAL1, CCL21, anti-CD47 |
| 93 | ADA2, HYAL1, CCL21, anti-TGFβ |
| 94 | ADA2, HYAL1, CCL21, anti-PD1 |
| 95 | ADA2, HYAL1, CCL21, anti-TREM2 |
| 96 | ADA2, HYAL1, IL-12, anti-CD47 |
| 97 | ADA2, HYAL1, IL-12, anti-TGFβ |
| 98 | ADA2, HYAL1, IL-12, anti-PD1 |
| 99 | ADA2, HYAL1, IL-12, anti-TREM2 |
| 100 | ADA2, HYAL1, anti-CD47, anti-TGFβ |
| 101 | ADA2, HYAL1, anti-CD47, anti-PD1 |
| 102 | ADA2, HYAL1, anti-CD47, anti-TREM2 |
| 103 | ADA2, HYAL1, anti-TGFβ, anti-PD1 |
| 104 | ADA2, HYAL1, anti-TGFβ, anti-TREM2 |
| 105 | ADA2, HYAL1, anti-PD1, anti-TREM2 |
| 106 | ADA2, CHP, CCL21, IL-12 |
| 107 | ADA2, CHP, CCL21, anti-CD47 |
| 108 | ADA2, CHP, CCL21, anti-TGFβ |
| 109 | ADA2, CHP, CCL21, anti-PD1 |
| 110 | ADA2, CHP, CCL21, anti-TREM2 |
| 111 | ADA2, CHP, IL-12, anti-CD47 |
| 112 | ADA2, CHP, IL-12, anti-TGFβ |
| 113 | ADA2, CHP, IL-12, anti-PD1 |
| 114 | ADA2, CHP, IL-12, anti-TREM2 |
| 115 | ADA2, CHP, anti-CD47, anti-TGFβ |
| 116 | ADA2, CHP, anti-CD47, anti-PD1 |
| 117 | ADA2, CHP, anti-CD47, anti-TREM2 |
| 118 | ADA2, CHP, anti-TGFβ, anti-PD1 |
| 119 | ADA2, CHP, anti-TGFβ, anti-TREM2 |
| 120 | ADA2, CHP, anti-PD1, anti-TREM2 |
| 121 | ADA2, CCL21, IL-12, anti-CD47 |
| 122 | ADA2, CCL21, IL-12, anti-TGFβ |
| 123 | ADA2, CCL21, IL-12, anti-PD1 |
| 124 | ADA2, CCL21, IL-12, anti-TREM2 |
| 125 | ADA2, CCL21, anti-CD47, anti-TGFβ |
| 126 | ADA2, CCL21, anti-CD47, anti-PD1 |
| 127 | ADA2, CCL21, anti-CD47, anti-TREM2 |
| 128 | ADA2, CCL21, anti-TGFβ, anti-PD1 |
| 129 | ADA2, CCL21, anti-TGFβ, anti-TREM2 |
| 130 | ADA2, CCL21, anti-PD1, anti-TREM2 |
| 131 | ADA2, IL-12, anti-CD47, anti-TGFβ |
| 132 | ADA2, IL-12, anti-CD47, anti-PD1 |
| 133 | ADA2, IL-12, anti-CD47, anti-TREM2 |
| 134 | ADA2, IL-12, anti-TGFβ, anti-PD1 |
| 135 | ADA2, IL-12, anti-TGFβ, anti-TREM2 |
| 136 | ADA2, IL-12, anti-PD1, anti-TREM2 |
| 137 | ADA2, anti-CD47, anti-TGFβ, anti-PD1 |
| 138 | ADA2, anti-CD47, anti-TGFβ, anti-TREM2 |
| 139 | ADA2, anti-CD47, anti-PD1, anti-TREM2 |
| 140 | ADA2, anti-TGFβ, anti-PD1, anti-TREM2 |
| 141 | HYAL1, CHP, CCL21, IL-12 |
| 142 | HYAL1, CHP, CCL21, anti-CD47 |
| 143 | HYAL1, CHP, CCL21, anti-TGFβ |
| 144 | HYAL1, CHP, CCL21, anti-PD1 |
| 145 | HYAL1, CHP, CCL21, anti-TREM2 |
| 146 | HYAL1, CHP, IL-12, anti-CD47 |
| 147 | HYAL1, CHP, IL-12, anti-TGFβ |
| 148 | HYAL1, CHP, IL-12, anti-PD1 |
| 149 | HYAL1, CHP, IL-12, anti-TREM2 |
| 150 | HYAL1, CHP, anti-CD47, anti-TGFβ |
| 151 | HYAL1, CHP, anti-CD47, anti-PD1 |
| 152 | HYAL1, CHP, anti-CD47, anti-TREM2 |
| 153 | HYAL1, CHP, anti-TGFβ, anti-PD1 |
| 154 | HYAL1, CHP, anti-TGFβ, anti-TREM2 |
| 155 | HYAL1, CHP, anti-PD1, anti-TREM2 |
| 156 | HYAL1, CCL21, IL-12, anti-CD47 |
| 157 | HYAL1, CCL21, IL-12, anti-TGFβ |
| 158 | HYAL1, CCL21, IL-12, anti-PD1 |
| 159 | HYAL1, CCL21, IL-12, anti-TREM2 |
| 160 | HYAL1, CCL21, anti-CD47, anti-TGFβ |
| 161 | HYAL1, CCL21, anti-CD47, anti-PD1 |
| 162 | HYAL1, CCL21, anti-CD47, anti-TREM2 |
| 163 | HYAL1, CCL21, anti-TGFβ, anti-PD1 |
| 164 | HYAL1, CCL21, anti-TGFβ, anti-TREM2 |
| 165 | HYAL1, CCL21, anti-PD1, anti-TREM2 |
| 166 | HYAL1, IL-12, anti-CD47, anti-TGFβ |
| 167 | HYAL1, IL-12, anti-CD47, anti-PD1 |
| 168 | HYAL1, IL-12, anti-CD47, anti-TREM2 |
| 169 | HYAL1, IL-12, anti-TGFβ, anti-PD1 |
| 170 | HYAL1, IL-12, anti-TGFβ, anti-TREM2 |
| 171 | HYAL1, IL-12, anti-PD1, anti-TREM2 |
| 172 | HYAL1, anti-CD47, anti-TGFβ, anti-PD1 |
| 173 | HYAL1, anti-CD47, anti-TGFβ, anti-TREM2 |
| 174 | HYAL1, anti-CD47, anti-PD1, anti-TREM2 |
| 175 | HYAL1, anti-TGFβ, anti-PD1, anti-TREM2 |
| 176 | CHP, CCL21, IL-12, anti-CD47 |
| 177 | CHP, CCL21, IL-12, anti-TGFβ |
| 178 | CHP, CCL21, IL-12, anti-PD1 |
| 179 | CHP, CCL21, IL-12, anti-TREM2 |
| 180 | CHP, CCL21, anti-CD47, anti-TGFβ |
| 181 | CHP, CCL21, anti-CD47, anti-PD1 |
| 182 | CHP, CCL21, anti-CD47, anti-TREM2 |
| 183 | CHP, CCL21, anti-TGFβ, anti-PD1 |
| 184 | CHP, CCL21, anti-TGFβ, anti-TREM2 |
| 185 | CHP, CCL21, anti-PD1, anti-TREM2 |
| 186 | CHP, IL-12, anti-CD47, anti-TGFβ |
| 187 | CHP, IL-12, anti-CD47, anti-PD1 |
| 188 | CHP, IL-12, anti-CD47, anti-TREM2 |
| 189 | CHP, IL-12, anti-TGFβ, anti-PD1 |
| 190 | CHP, IL-12, anti-TGFβ, anti-TREM2 |
| 191 | CHP, IL-12, anti-PD1, anti-TREM2 |
| 192 | CHP, anti-CD47, anti-TGFβ, anti-PD1 |
| 193 | CHP, anti-CD47, anti-TGFβ, anti-TREM2 |
| 194 | CHP, anti-CD47, anti-PD1, anti-TREM2 |
| 195 | CHP, anti-TGFβ, anti-PD1, anti-TREM2 |
| 196 | CCL21, IL-12, anti-CD47, anti-TGFβ |
| 197 | CCL21, IL-12, anti-CD47, anti-PD1 |
| 198 | CCL21, IL-12, anti-CD47, anti-TREM2 |
| 199 | CCL21, IL-12, anti-TGFβ, anti-PD1 |
| 200 | CCL21, IL-12, anti-TGFβ, anti-TREM2 |
| 201 | CCL21, IL-12, anti-PD1, anti-TREM2 |
| 202 | CCL21, anti-CD47, anti-TGFβ, anti-PD1 |
| 203 | CCL21, anti-CD47, anti-TGFβ, anti-TREM2 |
| 204 | CCL21, anti-CD47, anti-PD1, anti-TREM2 |
| 205 | CCL21, anti-TGFβ, anti-PD1, anti-TREM2 |
| 206 | IL-12, anti-CD47, anti-TGFβ, anti-PD1 |
| 207 | IL-12, anti-CD47, anti-TGFβ, anti-TREM2 |
| 208 | IL-12, anti-CD47, anti-PD1, anti-TREM2 |
| 209 | IL-12, anti-TGFβ, anti-PD1, anti-TREM2 |
| 210 | anti-CD47, anti-TGFβ, anti-PD1, anti-TREM2 |
| 211 | CTX-BiTE, HPGD, ADA2, HYAL1 |
| 212 | CTX-BiTE, HPGD, ADA2, CHP |
| 213 | CTX-BiTE, HPGD, ADA2, CCL21 |
| 214 | CTX-BiTE, HPGD, ADA2, IL-12 |
| 215 | CTX-BiTE, HPGD, ADA2, anti-CD47 |
| 216 | CTX-BiTE, HPGD, ADA2, anti-TGFβ |
| 217 | CTX-BiTE, HPGD, ADA2, anti-PD1 |
| 218 | CTX-BiTE, HPGD, ADA2, anti-TREM2 |
| 219 | CTX-BiTE, HPGD, HYAL1, CHP |
| 220 | CTX-BiTE, HPGD, HYAL1, CCL21 |
| 221 | CTX-BiTE, HPGD, HYAL1, IL-12 |
| 222 | CTX-BiTE, HPGD, HYAL1, anti-CD47 |
| 223 | CTX-BiTE, HPGD, HYAL1, anti-TGFβ |
| 224 | CTX-BiTE, HPGD, HYAL1, anti-PD1 |
| 225 | CTX-BiTE, HPGD, HYAL1, anti-TREM2 |
| 226 | CTX-BiTE, HPGD, CHP, CCL21 |
| 227 | CTX-BiTE, HPGD, CHP, IL-12 |
| 228 | CTX-BiTE, HPGD, CHP, anti-CD47 |
| 229 | CTX-BiTE, HPGD, CHP, anti-TGFβ |
| 230 | CTX-BiTE, HPGD, CHP, anti-PD1 |
| 231 | CTX-BiTE, HPGD, CHP, anti-TREM2 |
| 232 | CTX-BiTE, HPGD, CCL21, IL-12 |
| 233 | CTX-BiTE, HPGD, CCL21, anti-CD47 |
| 234 | CTX-BiTE, HPGD, CCL21, anti-TGFβ |
| 235 | CTX-BiTE, HPGD, CCL21, anti-PD1 |
| 236 | CTX-BiTE, HPGD, CCL21, anti-TREM2 |
| 237 | CTX-BiTE, HPGD, IL-12, anti-CD47 |
| 238 | CTX-BiTE, HPGD, IL-12, anti-TGFβ |
| 239 | CTX-BiTE, HPGD, IL-12, anti-PD1 |
| 240 | CTX-BiTE, HPGD, IL-12, anti-TREM2 |
| 241 | CTX-BiTE, HPGD, anti-CD47, anti-TGFβ |
| 242 | CTX-BiTE, HPGD, anti-CD47, anti-PD1 |
| 243 | CTX-BiTE, HPGD, anti-CD47, anti-TREM2 |
| 244 | CTX-BiTE, HPGD, anti-TGFβ, anti-PD1 |
| 245 | CTX-BiTE, HPGD, anti-TGFβ, anti-TREM2 |
| 246 | CTX-BiTE, HPGD, anti-PD1, anti-TREM2 |
| 247 | CTX-BiTE, ADA2, HYAL1, CHP |
| 248 | CTX-BiTE, ADA2, HYAL1, CCL21 |
| 249 | CTX-BiTE, ADA2, HYAL1, IL-12 |
| 250 | CTX-BiTE, ADA2, HYAL1, anti-CD47 |
| 251 | CTX-BiTE, ADA2, HYAL1, anti-TGFβ |
| 252 | CTX-BiTE, ADA2, HYAL1, anti-PD1 |
| 253 | CTX-BiTE, ADA2, HYAL1, anti-TREM2 |
| 254 | CTX-BiTE, ADA2, CHP, CCL21 |
| 255 | CTX-BiTE, ADA2, CHP, IL-12 |
| 256 | CTX-BiTE, ADA2, CHP, anti-CD47 |
| 257 | CTX-BiTE, ADA2, CHP, anti-TGFβ |
| 258 | CTX-BiTE, ADA2, CHP, anti-PD1 |
| 259 | CTX-BiTE, ADA2, CHP, anti-TREM2 |
| 260 | CTX-BiTE, ADA2, CCL21, IL-12 |
| 261 | CTX-BiTE, ADA2, CCL21, anti-CD47 |
| 262 | CTX-BiTE, ADA2, CCL21, anti-TGFβ |
| 263 | CTX-BiTE, ADA2, CCL21, anti-PD1 |
| 264 | CTX-BiTE, ADA2, CCL21, anti-TREM2 |
| 265 | CTX-BiTE, ADA2, IL-12, anti-CD47 |
| 266 | CTX-BiTE, ADA2, IL-12, anti-TGFβ |
| 267 | CTX-BiTE, ADA2, IL-12, anti-PD1 |
| 268 | CTX-BiTE, ADA2, IL-12, anti-TREM2 |
| 269 | CTX-BiTE, ADA2, anti-CD47, anti-TGFβ |
| 270 | CTX-BiTE, ADA2, anti-CD47, anti-PD1 |
| 271 | CTX-BiTE, ADA2, anti-CD47, anti-TREM2 |
| 272 | CTX-BiTE, ADA2, anti-TGFβ, anti-PD1 |
| 273 | CTX-BiTE, ADA2, anti-TGFβ, anti-TREM2 |
| 274 | CTX-BiTE, ADA2, anti-PD1, anti-TREM2 |
| 275 | CTX-BiTE, HYAL1, CHP, CCL21 |
| 276 | CTX-BiTE, HYAL1, CHP, IL-12 |
| 277 | CTX-BiTE, HYAL1, CHP, anti-CD47 |
| 278 | CTX-BiTE, HYAL1, CHP, anti-TGFβ |
| 279 | CTX-BiTE, HYAL1, CHP, anti-PD1 |
| 280 | CTX-BiTE, HYAL1, CHP, anti-TREM2 |
| 281 | CTX-BiTE, HYAL1, CCL21, IL-12 |
| 282 | CTX-BiTE, HYAL1, CCL21, anti-CD47 |
| 283 | CTX-BiTE, HYAL1, CCL21, anti-TGFβ |
| 284 | CTX-BiTE, HYAL1, CCL21, anti-PD1 |
| 285 | CTX-BiTE, HYAL1, CCL21, anti-TREM2 |
| 286 | CTX-BiTE, HYAL1, IL-12, anti-CD47 |
| 287 | CTX-BiTE, HYAL1, IL-12, anti-TGFβ |
| 288 | CTX-BiTE, HYAL1, IL-12, anti-PD1 |
| 289 | CTX-BiTE, HYAL1, IL-12, anti-TREM2 |
| 290 | CTX-BiTE, HYAL1, anti-CD47, anti-TGFβ |
| 291 | CTX-BiTE, HYAL1, anti-CD47, anti-PD1 |
| 292 | CTX-BiTE, HYAL1, anti-CD47, anti-TREM2 |
| 293 | CTX-BiTE, HYAL1, anti-TGFβ, anti-PD1 |
| 294 | CTX-BiTE, HYAL1, anti-TGFβ, anti-TREM2 |
| 295 | CTX-BiTE, HYAL1, anti-PD1, anti-TREM2 |
| 296 | CTX-BiTE, CHP, CCL21, IL-12 |
| 297 | CTX-BiTE, CHP, CCL21, anti-CD47 |
| 298 | CTX-BiTE, CHP, CCL21, anti-TGFβ |
| 299 | CTX-BiTE, CHP, CCL21, anti-PD1 |
| 300 | CTX-BiTE, CHP, CCL21, anti-TREM2 |
| 301 | CTX-BiTE, CHP, IL-12, anti-CD47 |
| 302 | CTX-BiTE, CHP, IL-12, anti-TGFβ |
| 303 | CTX-BiTE, CHP, IL-12, anti-PD1 |
| 304 | CTX-BiTE, CHP, IL-12, anti-TREM2 |
| 305 | CTX-BiTE, CHP, anti-CD47, anti-TGFβ |
| 306 | CTX-BiTE, CHP, anti-CD47, anti-PD1 |
| 307 | CTX-BiTE, CHP, anti-CD47, anti-TREM2 |
| 308 | CTX-BiTE, CHP, anti-TGFβ, anti-PD1 |
| 309 | CTX-BiTE, CHP, anti-TGFβ, anti-TREM2 |
| 310 | CTX-BiTE, CHP, anti-PD1, anti-TREM2 |
| 311 | CTX-BiTE, CCL21, IL-12, anti-CD47 |
| 312 | CTX-BiTE, CCL21, IL-12, anti-TGFβ |
| 313 | CTX-BiTE, CCL21, IL-12, anti-PD1 |
| 314 | CTX-BiTE, CCL21, IL-12, anti-TREM2 |
| 315 | CTX-BiTE, CCL21, anti-CD47, anti-TGFβ |
| 316 | CTX-BiTE, CCL21, anti-CD47, anti-PD1 |
| 317 | CTX-BiTE, CCL21, anti-CD47, anti-TREM2 |
| 318 | CTX-BiTE, CCL21, anti-TGFβ, anti-PD1 |
| 319 | CTX-BiTE, CCL21, anti-TGFβ, anti-TREM2 |
| 320 | CTX-BiTE, CCL21, anti-PD1, anti-TREM2 |
| 321 | CTX-BiTE, IL-12, anti-CD47, anti-TGFβ |
| 322 | CTX-BiTE, IL-12, anti-CD47, anti-PD1 |
| 323 | CTX-BiTE, IL-12, anti-CD47, anti-TREM2 |
| 324 | CTX-BiTE, IL-12, anti-TGFβ, anti-PD1 |
| 325 | CTX-BiTE, IL-12, anti-TGFβ, anti-TREM2 |
| 326 | CTX-BiTE, IL-12, anti-PD1, anti-TREM2 |
| 327 | CTX-BiTE, anti-CD47, anti-TGFβ, anti-PD1 |
| 328 | CTX-BiTE, anti-CD47, anti-TGFβ, anti-TREM2 |
| 329 | CTX-BiTE, anti-CD47, anti-PD1, anti-TREM2 |
| 330 | CTX-BiTE, anti-TGFβ, anti-PD1, anti-TREM2 |

[0354] In some embodiments, the oncolytic viruses of the disclosure comprise one or more polynucleotides encoding five or more payload molecules comprising any of the combinations listed in Table 7 below.

TABLE 7
Combination of Five Payload Molecules

| Combo # | Payload Molecules |
|---|---|
| 1 | HPGD, ADA2, HYAL1, CHP, CCL21 |
| 2 | HPGD, ADA2, HYAL1, CHP, IL-12 |
| 3 | HPGD, ADA2, HYAL1, CHP, anti-CD47 |
| 4 | HPGD, ADA2, HYAL1, CHP, anti-TGFβ |
| 5 | HPGD, ADA2, HYAL1, CHP, anti-PD1 |
| 6 | HPGD, ADA2, HYAL1, CHP, anti-TREM2 |
| 7 | HPGD, ADA2, HYAL1, CCL21, IL-12 |
| 8 | HPGD, ADA2, HYAL1, CCL21, anti-CD47 |
| 9 | HPGD, ADA2, HYAL1, CCL21, anti-TGFβ |
| 10 | HPGD, ADA2, HYAL1, CCL21, anti-PD1 |
| 11 | HPGD, ADA2, HYAL1, CCL21, anti-TREM2 |
| 12 | HPGD, ADA2, HYAL1, IL-12, anti-CD47 |
| 13 | HPGD, ADA2, HYAL1, IL-12, anti-TGFβ |
| 14 | HPGD, ADA2, HYAL1, IL-12, anti-PD1 |
| 15 | HPGD, ADA2, HYAL1, IL-12, anti-TREM2 |
| 16 | HPGD, ADA2, HYAL1, anti-CD47, anti-TGFβ |
| 17 | HPGD, ADA2, HYAL1, anti-CD47, anti-PD1 |
| 18 | HPGD, ADA2, HYAL1, anti-CD47, anti-TREM2 |
| 19 | HPGD, ADA2, HYAL1, anti-TGFβ, anti-PD1 |
| 20 | HPGD, ADA2, HYAL1, anti-TGFβ, anti-TREM2 |
| 21 | HPGD, ADA2, HYAL1, anti-PD1, anti-TREM2 |
| 22 | HPGD, ADA2, CHP, CCL21, IL-12 |
| 23 | HPGD, ADA2, CHP, CCL21, anti-CD47 |
| 24 | HPGD, ADA2, CHP, CCL21, anti-TGFβ |
| 25 | HPGD, ADA2, CHP, CCL21, anti-PD1 |
| 26 | HPGD, ADA2, CHP, CCL21, anti-TREM2 |
| 27 | HPGD, ADA2, CHP, IL-12, anti-CD47 |
| 28 | HPGD, ADA2, CHP, IL-12, anti-TGFβ |
| 29 | HPGD, ADA2, CHP, IL-12, anti-PD1 |
| 30 | HPGD, ADA2, CHP, IL-12, anti-TREM2 |
| 31 | HPGD, ADA2, CHP, anti-CD47, anti-TGFβ |
| 32 | HPGD, ADA2, CHP, anti-CD47, anti-PD1 |
| 33 | HPGD, ADA2, CHP, anti-CD47, anti-TREM2 |
| 34 | HPGD, ADA2, CHP, anti-TGFβ, anti-PD1 |
| 35 | HPGD, ADA2, CHP, anti-TGFβ, anti-TREM2 |
| 36 | HPGD, ADA2, CHP, anti-PD1, anti-TREM2 |
| 37 | HPGD, ADA2, CCL21, IL-12, anti-CD47 |
| 38 | HPGD, ADA2, CCL21, IL-12, anti-TGFβ |
| 39 | HPGD, ADA2, CCL21, IL-12, anti-PD1 |
| 40 | HPGD, ADA2, CCL21, IL-12, anti-TREM2 |
| 41 | HPGD, ADA2, CCL21, anti-CD47, anti-TGFβ |
| 42 | HPGD, ADA2, CCL21, anti-CD47, anti-PD1 |
| 43 | HPGD, ADA2, CCL21, anti-CD47, anti-TREM2 |
| 44 | HPGD, ADA2, CCL21, anti-TGFβ, anti-PD1 |
| 45 | HPGD, ADA2, CCL21, anti-TGFβ, anti-TREM2 |
| 46 | HPGD, ADA2, CCL21, anti-PD1, anti-TREM2 |
| 47 | HPGD, ADA2, IL-12, anti-CD47, anti-TGFβ |
| 48 | HPGD, ADA2, IL-12, anti-CD47, anti-PD1 |
| 49 | HPGD, ADA2, IL-12, anti-CD47, anti-TREM2 |
| 50 | HPGD, ADA2, IL-12, anti-TGFβ, anti-PD1 |
| 51 | HPGD, ADA2, IL-12, anti-TGFβ, anti-TREM2 |
| 52 | HPGD, ADA2, IL-12, anti-PD1, anti-TREM2 |
| 53 | HPGD, ADA2, anti-CD47, anti-TGFβ, anti-PD1 |
| 54 | HPGD, ADA2, anti-CD47, anti-TGFβ, anti-TREM2 |
| 55 | HPGD, ADA2, anti-CD47, anti-PD1, anti-TREM2 |
| 56 | HPGD, ADA2, anti-TGFβ, anti-PD1, anti-TREM2 |
| 57 | HPGD, HYAL1, CHP, CCL21, IL-12 |
| 58 | HPGD, HYAL1, CHP, CCL21, anti-CD47 |
| 59 | HPGD, HYAL1, CHP, CCL21, anti-TGFβ |
| 60 | HPGD, HYAL1, CHP, CCL21, anti-PD1 |
| 61 | HPGD, HYAL1, CHP, CCL21, anti-TREM2 |
| 62 | HPGD, HYAL1, CHP, IL-12, anti-CD47 |
| 63 | HPGD, HYAL1, CHP, IL-12, anti-TGFβ |
| 64 | HPGD, HYAL1, CHP, IL-12, anti-PD1 |
| 65 | HPGD, HYAL1, CHP, IL-12, anti-TREM2 |
| 66 | HPGD, HYAL1, CHP, anti-CD47, anti-TGFβ |
| 67 | HPGD, HYAL1, CHP, anti-CD47, anti-PD1 |
| 68 | HPGD, HYAL1, CHP, anti-CD47, anti-TREM2 |
| 69 | HPGD, HYAL1, CHP, anti-TGFβ, anti-PD1 |
| 70 | HPGD, HYAL1, CHP, anti-TGFβ, anti-TREM2 |
| 71 | HPGD, HYAL1, CHP, anti-PD1, anti-TREM2 |
| 72 | HPGD, HYAL1, CCL21, IL-12, anti-CD47 |
| 73 | HPGD, HYAL1, CCL21, IL-12, anti-TGFβ |
| 74 | HPGD, HYAL1, CCL21, IL-12, anti-PD1 |
| 75 | HPGD, HYAL1, CCL21, IL-12, anti-TREM2 |
| 76 | HPGD, HYAL1, CCL21, anti-CD47, anti-TGFβ |
| 77 | HPGD, HYAL1, CCL21, anti-CD47, anti-PD1 |
| 78 | HPGD, HYAL1, CCL21, anti-CD47, anti-TREM2 |
| 79 | HPGD, HYAL1, CCL21, anti-TGFβ, anti-PD1 |
| 80 | HPGD, HYAL1, CCL21, anti-TGFβ, anti-TREM2 |
| 81 | HPGD, HYAL1, CCL21, anti-PD1, anti-TREM2 |
| 82 | HPGD, HYAL1, IL-12, anti-CD47, anti-TGFβ |
| 83 | HPGD, HYAL1, IL-12, anti-CD47, anti-PD1 |
| 84 | HPGD, HYAL1, IL-12, anti-CD47, anti-TREM2 |
| 85 | HPGD, HYAL1, IL-12, anti-TGFβ, anti-PD1 |
| 86 | HPGD, HYAL1, IL-12, anti-TGFβ, anti-TREM2 |
| 87 | HPGD, HYAL1, IL-12, anti-PD1, anti-TREM2 |
| 88 | HPGD, HYAL1, anti-CD47, anti-TGFβ, anti-PD1 |
| 89 | HPGD, HYAL1, anti-CD47, anti-TGFβ, anti-TREM2 |
| 90 | HPGD, HYAL1, anti-CD47, anti-PD1, anti-TREM2 |
| 91 | HPGD, HYAL1, anti-TGFβ, anti-PD1, anti-TREM2 |
| 92 | HPGD, CHP, CCL21, IL-12, anti-CD47 |
| 93 | HPGD, CHP, CCL21, IL-12, anti-TGFβ |
| 94 | HPGD, CHP, CCL21, IL-12, anti-PD1 |
| 95 | HPGD, CHP, CCL21, IL-12, anti-TREM2 |
| 96 | HPGD, CHP, CCL21, anti-CD47, anti-TGFβ |
| 97 | HPGD, CHP, CCL21, anti-CD47, anti-PD1 |
| 98 | HPGD, CHP, CCL21, anti-CD47, anti-TREM2 |
| 99 | HPGD, CHP, CCL21, anti-TGFβ, anti-PD1 |
| 100 | HPGD, CHP, CCL21, anti-TGFβ, anti-TREM2 |
| 101 | HPGD, CHP, CCL21, anti-PD1, anti-TREM2 |
| 102 | HPGD, CHP, IL-12, anti-CD47, anti-TGFβ |
| 103 | HPGD, CHP, IL-12, anti-CD47, anti-PD1 |
| 104 | HPGD, CHP, IL-12, anti-CD47, anti-TREM2 |
| 105 | HPGD, CHP, IL-12, anti-TGFβ, anti-PD1 |
| 106 | HPGD, CHP, IL-12, anti-TGFβ, anti-TREM2 |
| 107 | HPGD, CHP, IL-12, anti-PD1, anti-TREM2 |
| 108 | HPGD, CHP, anti-CD47, anti-TGFβ, anti-PD1 |
| 109 | HPGD, CHP, anti-CD47, anti-TGFβ, anti-TREM2 |
| 110 | HPGD, CHP, anti-CD47, anti-PD1, anti-TREM2 |
| 111 | HPGD, CHP, anti-TGFβ, anti-PD1, anti-TREM2 |
| 112 | HPGD, CCL21, IL-12, anti-CD47, anti-TGFβ |
| 113 | HPGD, CCL21, IL-12, anti-CD47, anti-PD1 |
| 114 | HPGD, CCL21, IL-12, anti-CD47, anti-TREM2 |
| 115 | HPGD, CCL21, IL-12, anti-TGFβ, anti-PD1 |
| 116 | HPGD, CCL21, IL-12, anti-TGFβ, anti-TREM2 |
| 117 | HPGD, CCL21, IL-12, anti-PD1, anti-TREM2 |
| 118 | HPGD, CCL21, anti-CD47, anti-TGFβ, anti-PD1 |
| 119 | HPGD, CCL21, anti-CD47, anti-TGFβ, anti-TREM2 |
| 120 | HPGD, CCL21, anti-CD47, anti-PD1, anti-TREM2 |
| 121 | HPGD, CCL21, anti-TGFβ, anti-PD1, anti-TREM2 |
| 122 | HPGD, IL-12, anti-CD47, anti-TGFβ, anti-PD1 |
| 123 | HPGD, IL-12, anti-CD47, anti-TGFβ, anti-TREM2 |
| 124 | HPGD, IL-12, anti-CD47, anti-PD1, anti-TREM2 |
| 125 | HPGD, IL-12, anti-TGFβ, anti-PD1, anti-TREM2 |
| 126 | HPGD, anti-CD47, anti-TGFβ, anti-PD1, anti-TREM2 |
| 127 | ADA2, HYAL1, CHP, CCL21, IL-12 |
| 128 | ADA2, HYAL1, CHP, CCL21, anti-CD47 |
| 129 | ADA2, HYAL1, CHP, CCL21, anti-TGFβ |
| 130 | ADA2, HYAL1, CHP, CCL21, anti-PD1 |
| 131 | ADA2, HYAL1, CHP, CCL21, anti-TREM2 |
| 132 | ADA2, HYAL1, CHP, IL-12, anti-CD47 |
| 133 | ADA2, HYAL1, CHP, IL-12, anti-TGFβ |
| 134 | ADA2, HYAL1, CHP, IL-12, anti-PD1 |
| 135 | ADA2, HYAL1, CHP, IL-12, anti-TREM2 |
| 136 | ADA2, HYAL1, CHP, anti-CD47, anti-TGFβ |
| 137 | ADA2, HYAL1, CHP, anti-CD47, anti-PD1 |
| 138 | ADA2, HYAL1, CHP, anti-CD47, anti-TREM2 |
| 139 | ADA2, HYAL1, CHP, anti-TGFβ, anti-PD1 |
| 140 | ADA2, HYAL1, CHP, anti-TGFβ, anti-TREM2 |
| 141 | ADA2, HYAL1, CHP, anti-PD1, anti-TREM2 |
| 142 | ADA2, HYAL1, CCL21, IL-12, anti-CD47 |
| 143 | ADA2, HYAL1, CCL21, IL-12, anti-TGFβ |
| 144 | ADA2, HYAL1, CCL21, IL-12, anti-PD1 |
| 145 | ADA2, HYAL1, CCL21, IL-12, anti-TREM2 |
| 146 | ADA2, HYAL1, CCL21, anti-CD47, anti-TGFβ |
| 147 | ADA2, HYAL1, CCL21, anti-CD47, anti-PD1 |
| 148 | ADA2, HYAL1, CCL21, anti-CD47, anti-TREM2 |
| 149 | ADA2, HYAL1, CCL21, anti-TGFβ, anti-PD1 |
| 150 | ADA2, HYAL1, CCL21, anti-TGFβ, anti-TREM2 |
| 151 | ADA2, HYAL1, CCL21, anti-PD1, anti-TREM2 |
| 152 | ADA2, HYAL1, IL-12, anti-CD47, anti-TGFβ |
| 153 | ADA2, HYAL1, IL-12, anti-CD47, anti-PD1 |
| 154 | ADA2, HYAL1, IL-12, anti-CD47, anti-TREM2 |
| 155 | ADA2, HYAL1, IL-12, anti-TGFβ, anti-PD1 |
| 156 | ADA2, HYAL1, IL-12, anti-TGFβ, anti-TREM2 |
| 157 | ADA2, HYAL1, IL-12, anti-PD1, anti-TREM2 |
| 158 | ADA2, HYAL1, anti-CD47, anti-TGFβ, anti-PD1 |
| 159 | ADA2, HYAL1, anti-CD47, anti-TGFβ, anti-TREM2 |
| 160 | ADA2, HYAL1, anti-CD47, anti-PD1, anti-TREM2 |
| 161 | ADA2, HYAL1, anti-TGFβ, anti-PD1, anti-TREM2 |
| 162 | ADA2, CHP, CCL21, IL-12, anti-CD47 |
| 163 | ADA2, CHP, CCL21, IL-12, anti-TGFβ |
| 164 | ADA2, CHP, CCL21, IL-12, anti-PD1 |
| 165 | ADA2, CHP, CCL21, IL-12, anti-TREM2 |
| 166 | ADA2, CHP, CCL21, anti-CD47, anti-TGFβ |
| 167 | ADA2, CHP, CCL21, anti-CD47, anti-PD1 |
| 168 | ADA2, CHP, CCL21, anti-CD47, anti-TREM2 |
| 169 | ADA2, CHP, CCL21, anti-TGFβ, anti-PD1 |
| 170 | ADA2, CHP, CCL21, anti-TGFβ, anti-TREM2 |
| 171 | ADA2, CHP, CCL21, anti-PD1, anti-TREM2 |
| 172 | ADA2, CHP, IL-12, anti-CD47, anti-TGFβ |
| 173 | ADA2, CHP, IL-12, anti-CD47, anti-PD1 |
| 174 | ADA2, CHP, IL-12, anti-CD47, anti-TREM2 |
| 175 | ADA2, CHP, IL-12, anti-TGFβ, anti-PD1 |
| 176 | ADA2, CHP, IL-12, anti-TGFβ, anti-TREM2 |
| 177 | ADA2, CHP, IL-12, anti-PD1, anti-TREM2 |
| 178 | ADA2, CHP, anti-CD47, anti-TGFβ, anti-PD1 |
| 179 | ADA2, CHP, anti-CD47, anti-TGFβ, anti-TREM2 |
| 180 | ADA2, CHP, anti-CD47, anti-PD1, anti-TREM2 |
| 181 | ADA2, CHP, anti-TGFβ, anti-PD1, anti-TREM2 |
| 182 | ADA2, CCL21, IL-12, anti-CD47, anti-TGFβ |
| 183 | ADA2, CCL21, IL-12, anti-CD47, anti-PD1 |
| 184 | ADA2, CCL21, IL-12, anti-CD47, anti-TREM2 |
| 185 | ADA2, CCL21, IL-12, anti-TGFβ, anti-PD1 |
| 186 | ADA2, CCL21, IL-12, anti-TGFβ, anti-TREM2 |
| 187 | ADA2, CCL21, IL-12, anti-PD1, anti-TREM2 |
| 188 | ADA2, CCL21, anti-CD47, anti-TGFβ, anti-PD1 |
| 189 | ADA2, CCL21, anti-CD47, anti-TGFβ, anti-TREM2 |
| 190 | ADA2, CCL21, anti-CD47, anti-PD1, anti-TREM2 |
| 191 | ADA2, CCL21, anti-TGFβ, anti-PD1, anti-TREM2 |
| 192 | ADA2, IL-12, anti-CD47, anti-TGFβ, anti-PD1 |
| 193 | ADA2, IL-12, anti-CD47, anti-TGFβ, anti-TREM2 |
| 194 | ADA2, IL-12, anti-CD47, anti-PD1, anti-TREM2 |
| 195 | ADA2, IL-12, anti-TGFβ, anti-PD1, anti-TREM2 |
| 196 | ADA2, anti-CD47, anti-TGFβ, anti-PD1, anti-TREM2 |
| 197 | HYAL1, CHP, CCL21, IL-12, anti-CD47 |
| 198 | HYAL1, CHP, CCL21, IL-12, anti-TGFβ |
| 199 | HYAL1, CHP, CCL21, IL-12, anti-PD1 |
| 200 | HYAL1, CHP, CCL21, IL-12, anti-TREM2 |
| 201 | HYAL1, CHP, CCL21, anti-CD47, anti-TGFβ |
| 202 | HYAL1, CHP, CCL21, anti-CD47, anti-PD1 |
| 203 | HYAL1, CHP, CCL21, anti-CD47, anti-TREM2 |
| 204 | HYAL1, CHP, CCL21, anti-TGFβ, anti-PD1 |
| 205 | HYAL1, CHP, CCL21, anti-TGFβ, anti-TREM2 |
| 206 | HYAL1, CHP, CCL21, anti-PD1, anti-TREM2 |
| 207 | HYAL1, CHP, IL-12, anti-CD47, anti-TGFβ |
| 208 | HYAL1, CHP, IL-12, anti-CD47, anti-PD1 |
| 209 | HYAL1, CHP, IL-12, anti-CD47, anti-TREM2 |
| 210 | HYAL1, CHP, IL-12, anti-TGFβ, anti-PD1 |
| 211 | HYAL1, CHP, IL-12, anti-TGFβ, anti-TREM2 |
| 212 | HYAL1, CHP, IL-12, anti-PD1, anti-TREM2 |
| 213 | HYAL1, CHP, anti-CD47, anti-TGFβ, anti-PD1 |
| 214 | HYAL1, CHP, anti-CD47, anti-TGFβ, anti-TREM2 |
| 215 | HYAL1, CHP, anti-CD47, anti-PD1, anti-TREM2 |
| 216 | HYAL1, CHP, anti-TGFβ, anti-PD1, anti-TREM2 |
| 217 | HYAL1, CCL21, IL-12, anti-CD47, anti-TGFβ |
| 218 | HYAL1, CCL21, IL-12, anti-CD47, anti-PD1 |
| 219 | HYAL1, CCL21, IL-12, anti-CD47, anti-TREM2 |
| 220 | HYAL1, CCL21, IL-12, anti-TGFβ, anti-PD1 |
| 221 | HYAL1, CCL21, IL-12, anti-TGFβ, anti-TREM2 |
| 222 | HYAL1, CCL21, IL-12, anti-PD1, anti-TREM2 |
| 223 | HYAL1, CCL21, anti-CD47, anti-TGFβ, anti-PD1 |
| 224 | HYAL1, CCL21, anti-CD47, anti-TGFβ, anti-TREM2 |
| 225 | HYAL1, CCL21, anti-CD47, anti-PD1, anti-TREM2 |
| 226 | HYAL1, CCL21, anti-TGFβ, anti-PD1, anti-TREM2 |
| 227 | HYAL1, IL-12, anti-CD47, anti-TGFβ, anti-PD1 |
| 228 | HYAL1, IL-12, anti-CD47, anti-TGFβ, anti-TREM2 |
| 229 | HYAL1, IL-12, anti-CD47, anti-PD1, anti-TREM2 |
| 230 | HYAL1, IL-12, anti-TGFβ, anti-PD1, anti-TREM2 |
| 231 | HYAL1, anti-CD47, anti-TGFβ, anti-PD1, anti-TREM2 |
| 232 | CHP, CCL21, IL-12, anti-CD47, anti-TGFβ |
| 233 | CHP, CCL21, IL-12, anti-CD47, anti-PD1 |
| 234 | CHP, CCL21, IL-12, anti-CD47, anti-TREM2 |
| 235 | CHP, CCL21, IL-12, anti-TGFβ, anti-PD1 |
| 236 | CHP, CCL21, IL-12, anti-TGFβ, anti-TREM2 |
| 237 | CHP, CCL21, IL-12, anti-PD1, anti-TREM2 |
| 238 | CHP, CCL21, anti-CD47, anti-TGFβ, anti-PD1 |
| 239 | CHP, CCL21, anti-CD47, anti-TGFβ, anti-TREM2 |
| 240 | CHP, CCL21, anti-CD47, anti-PD1, anti-TREM2 |
| 241 | CHP, CCL21, anti-TGFβ, anti-PD1, anti-TREM2 |
| 242 | CHP, IL-12, anti-CD47, anti-TGFβ, anti-PD1 |
| 243 | CHP, IL-12, anti-CD47, anti-TGFβ, anti-TREM2 |
| 244 | CHP, IL-12, anti-CD47, anti-PD1, anti-TREM2 |
| 245 | CHP, IL-12, anti-TGFβ, anti-PD1, anti-TREM2 |
| 246 | CHP, anti-CD47, anti-TGFβ, anti-PD1, anti-TREM2 |
| 247 | CCL21, IL-12, anti-CD47, anti-TGFβ, anti-PD1 |
| 248 | CCL21, IL-12, anti-CD47, anti-TGFβ, anti-TREM2 |
| 249 | CCL21, IL-12, anti-CD47, anti-PD1, anti-TREM2 |
| 250 | CCL21, IL-12, anti-TGFβ, anti-PD1, anti-TREM2 |
| 251 | CCL21, anti-CD47, anti-TGFβ, anti-PD1, anti-TREM2 |
| 252 | IL-12, anti-CD47, anti-TGFβ, anti-PD1, anti-TREM2 |
| 253 | CTX-BiTE, HPGD, ADA2, HYAL1, CHP |
| 254 | CTX-BiTE, HPGD, ADA2, HYAL1, CCL21 |
| 255 | CTX-BiTE, HPGD, ADA2, HYAL1, IL-12 |
| 256 | CTX-BiTE, HPGD, ADA2, HYAL1, anti-CD47 |
| 257 | CTX-BiTE, HPGD, ADA2, HYAL1, anti-TGFβ |
| 258 | CTX-BiTE, HPGD, ADA2, HYAL1, anti-PD1 |
| 259 | CTX-BiTE, HPGD, ADA2, HYAL1, anti-TREM2 |
| 260 | CTX-BiTE, HPGD, ADA2, CHP, CCL21 |
| 261 | CTX-BiTE, HPGD, ADA2, CHP, IL-12 |
| 262 | CTX-BiTE, HPGD, ADA2, CHP, anti-CD47 |
| 263 | CTX-BiTE, HPGD, ADA2, CHP, anti-TGFβ |
| 264 | CTX-BiTE, HPGD, ADA2, CHP, anti-PD1 |
| 265 | CTX-BiTE, HPGD, ADA2, CHP, anti-TREM2 |
| 266 | CTX-BiTE, HPGD, ADA2, CCL21, IL-12 |
| 267 | CTX-BiTE, HPGD, ADA2, CCL21, anti-CD47 |
| 268 | CTX-BiTE, HPGD, ADA2, CCL21, anti-TGFβ |
| 269 | CTX-BiTE, HPGD, ADA2, CCL21, anti-PD1 |
| 270 | CTX-BiTE, HPGD, ADA2, CCL21, anti-TREM2 |
| 271 | CTX-BiTE, HPGD, ADA2, IL-12, anti-CD47 |
| 272 | CTX-BiTE, HPGD, ADA2, IL-12, anti-TGFβ |
| 273 | CTX-BiTE, HPGD, ADA2, IL-12, anti-PD1 |
| 274 | CTX-BiTE, HPGD, ADA2, IL-12, anti-TREM2 |
| 275 | CTX-BiTE, HPGD, ADA2, anti-CD47, anti-TGFβ |
| 276 | CTX-BiTE, HPGD, ADA2, anti-CD47, anti-PD1 |
| 277 | CTX-BiTE, HPGD, ADA2, anti-CD47, anti-TREM2 |
| 278 | CTX-BiTE, HPGD, ADA2, anti-TGFβ, anti-PD1 |
| 279 | CTX-BiTE, HPGD, ADA2, anti-TGFβ, anti-TREM2 |
| 280 | CTX-BiTE, HPGD, ADA2, anti-PD1, anti-TREM2 |
| 281 | CTX-BiTE, HPGD, HYAL1, CHP, CCL21 |
| 282 | CTX-BiTE, HPGD, HYAL1, CHP, IL-12 |
| 283 | CTX-BiTE, HPGD, HYAL1, CHP, anti-CD47 |
| 284 | CTX-BiTE, HPGD, HYAL1, CHP, anti-TGFβ |
| 285 | CTX-BiTE, HPGD, HYAL1, CHP, anti-PD1 |
| 286 | CTX-BiTE, HPGD, HYAL1, CHP, anti-TREM2 |
| 287 | CTX-BiTE, HPGD, HYAL1, CCL21, IL-12 |
| 288 | CTX-BiTE, HPGD, HYAL1, CCL21, anti-CD47 |
| 289 | CTX-BiTE, HPGD, HYAL1, CCL21, anti-TGFβ |
| 290 | CTX-BiTE, HPGD, HYAL1, CCL21, anti-PD1 |
| 291 | CTX-BiTE, HPGD, HYAL1, CCL21, anti-TREM2 |
| 292 | CTX-BiTE, HPGD, HYAL1, IL-12, anti-CD47 |
| 293 | CTX-BiTE, HPGD, HYAL1, IL-12, anti-TGFβ |
| 294 | CTX-BiTE, HPGD, HYAL1, IL-12, anti-PD1 |
| 295 | CTX-BiTE, HPGD, HYAL1, IL-12, anti-TREM2 |
| 296 | CTX-BiTE, HPGD, HYAL1, anti-CD47, anti-TGFβ |
| 297 | CTX-BiTE, HPGD, HYAL1, anti-CD47, anti-PD1 |
| 298 | CTX-BiTE, HPGD, HYAL1, anti-CD47, anti-TREM2 |
| 299 | CTX-BiTE, HPGD, HYAL1, anti-TGFβ, anti-PD1 |
| 300 | CTX-BiTE, HPGD, HYAL1, anti-TGFβ, anti-TREM2 |
| 301 | CTX-BiTE, HPGD, HYAL1, anti-PD1, anti-TREM2 |
| 302 | CTX-BiTE, HPGD, CHP, CCL21, IL-12 |
| 303 | CTX-BiTE, HPGD, CHP, CCL21, anti-CD47 |
| 304 | CTX-BiTE, HPGD, CHP, CCL21, anti-TGFβ |
| 305 | CTX-BiTE, HPGD, CHP, CCL21, anti-PD1 |
| 306 | CTX-BiTE, HPGD, CHP, CCL21, anti-TREM2 |
| 307 | CTX-BiTE, HPGD, CHP, IL-12, anti-CD47 |
| 308 | CTX-BiTE, HPGD, CHP, IL-12, anti-TGFβ |
| 309 | CTX-BiTE, HPGD, CHP, IL-12, anti-PD1 |
| 310 | CTX-BiTE, HPGD, CHP, IL-12, anti-TREM2 |
| 311 | CTX-BiTE, HPGD, CHP, anti-CD47, anti-TGFβ |
| 312 | CTX-BiTE, HPGD, CHP, anti-CD47, anti-PD1 |
| 313 | CTX-BiTE, HPGD, CHP, anti-CD47, anti-TREM2 |
| 314 | CTX-BiTE, HPGD, CHP, anti-TGFβ, anti-PD1 |
| 315 | CTX-BiTE, HPGD, CHP, anti-TGFβ, anti-TREM2 |
| 316 | CTX-BiTE, HPGD, CHP, anti-PD1, anti-TREM2 |
| 317 | CTX-BiTE, HPGD, CCL21, IL-12, anti-CD47 |
| 318 | CTX-BiTE, HPGD, CCL21, IL-12, anti-TGFβ |
| 319 | CTX-BiTE, HPGD, CCL21, IL-12, anti-PD1 |
| 320 | CTX-BiTE, HPGD, CCL21, IL-12, anti-TREM2 |
| 321 | CTX-BiTE, HPGD, CCL21, anti-CD47, anti-TGFβ |
| 322 | CTX-BiTE, HPGD, CCL21, anti-CD47, anti-PD1 |
| 323 | CTX-BiTE, HPGD, CCL21, anti-CD47, anti-TREM2 |
| 324 | CTX-BiTE, HPGD, CCL21, anti-TGFβ, anti-PD1 |
| 325 | CTX-BiTE, HPGD, CCL21, anti-TGFβ, anti-TREM2 |
| 326 | CTX-BiTE, HPGD, CCL21, anti-PD1, anti-TREM2 |
| 327 | CTX-BiTE, HPGD, IL-12, anti-CD47, anti-TGFβ |
| 328 | CTX-BiTE, HPGD, IL-12, anti-CD47, anti-PD1 |
| 329 | CTX-BiTE, HPGD, IL-12, anti-CD47, anti-TREM2 |
| 330 | CTX-BiTE, HPGD, IL-12, anti-TGFβ, anti-PD1 |
| 331 | CTX-BiTE, HPGD, IL-12, anti-TGFβ, anti-TREM2 |
| 332 | CTX-BiTE, HPGD, IL-12, anti-PD1, anti-TREM2 |
| 333 | CTX-BiTE, HPGD, anti-CD47, anti-TGFβ, anti-PD1 |
| 334 | CTX-BiTE, HPGD, anti-CD47, anti-TGFβ, anti-TREM2 |
| 335 | CTX-BiTE, HPGD, anti-CD47, anti-PD1, anti-TREM2 |
| 336 | CTX-BiTE, HPGD, anti-TGFβ, anti-PD1, anti-TREM2 |
| 337 | CTX-BiTE, ADA2, HYAL1, CHP, CCL21 |
| 338 | CTX-BiTE, ADA2, HYAL1, CHP, IL-12 |
| 339 | CTX-BiTE, ADA2, HYAL1, CHP, anti-CD47 |
| 340 | CTX-BiTE, ADA2, HYAL1, CHP, anti-TGFβ |
| 341 | CTX-BiTE, ADA2, HYAL1, CHP, anti-PD1 |
| 342 | CTX-BiTE, ADA2, HYAL1, CHP, anti-TREM2 |
| 343 | CTX-BiTE, ADA2, HYAL1, CCL21, IL-12 |
| 344 | CTX-BiTE, ADA2, HYAL1, CCL21, anti-CD47 |
| 345 | CTX-BiTE, ADA2, HYAL1, CCL21, anti-TGFβ |
| 346 | CTX-BiTE, ADA2, HYAL1, CCL21, anti-PD1 |
| 347 | CTX-BiTE, ADA2, HYAL1, CCL21, anti-TREM2 |
| 348 | CTX-BiTE, ADA2, HYAL1, IL-12, anti-CD47 |
| 349 | CTX-BiTE, ADA2, HYAL1, IL-12, anti-TGFβ |
| 350 | CTX-BiTE, ADA2, HYAL1, IL-12, anti-PD1 |
| 351 | CTX-BiTE, ADA2, HYAL1, IL-12, anti-TREM2 |
| 352 | CTX-BiTE, ADA2, HYAL1, anti-CD47, anti-TGFβ |
| 353 | CTX-BiTE, ADA2, HYAL1, anti-CD47, anti-PD1 |
| 354 | CTX-BiTE, ADA2, HYAL1, anti-CD47, anti-TREM2 |
| 355 | CTX-BiTE, ADA2, HYAL1, anti-TGFβ, anti-PD1 |
| 356 | CTX-BiTE, ADA2, HYAL1, anti-TGFβ, anti-TREM2 |
| 357 | CTX-BiTE, ADA2, HYAL1, anti-PD1, anti-TREM2 |
| 358 | CTX-BiTE, ADA2, CHP, CCL21, IL-12 |
| 359 | CTX-BiTE, ADA2, CHP, CCL21, anti-CD47 |
| 360 | CTX-BiTE, ADA2, CHP, CCL21, anti-TGFβ |
| 361 | CTX-BiTE, ADA2, CHP, CCL21, anti-PD1 |
| 362 | CTX-BiTE, ADA2, CHP, CCL21, anti-TREM2 |
| 363 | CTX-BiTE, ADA2, CHP, IL-12, anti-CD47 |
| 364 | CTX-BiTE, ADA2, CHP, IL-12, anti-TGFβ |
| 365 | CTX-BiTE, ADA2, CHP, IL-12, anti-PD1 |
| 366 | CTX-BiTE, ADA2, CHP, IL-12, anti-TREM2 |
| 367 | CTX-BiTE, ADA2, CHP, anti-CD47, anti-TGFβ |
| 368 | CTX-BiTE, ADA2, CHP, anti-CD47, anti-PD1 |
| 369 | CTX-BiTE, ADA2, CHP, anti-CD47, anti-TREM2 |
| 370 | CTX-BiTE, ADA2, CHP, anti-TGFβ, anti-PD1 |
| 371 | CTX-BiTE, ADA2, CHP, anti-TGFβ, anti-TREM2 |
| 372 | CTX-BiTE, ADA2, CHP, anti-PD1, anti-TREM2 |
| 373 | CTX-BiTE, ADA2, CCL21, IL-12, anti-CD47 |
| 374 | CTX-BiTE, ADA2, CCL21, IL-12, anti-TGFβ |
| 375 | CTX-BiTE, ADA2, CCL21, IL-12, anti-PD1 |
| 376 | CTX-BiTE, ADA2, CCL21, IL-12, anti-TREM2 |
| 377 | CTX-BiTE, ADA2, CCL21, anti-CD47, anti-TGFβ |
| 378 | CTX-BiTE, ADA2, CCL21, anti-CD47, anti-PD1 |
| 379 | CTX-BiTE, ADA2, CCL21, anti-CD47, anti-TREM2 |
| 380 | CTX-BiTE, ADA2, CCL21, anti-TGFβ, anti-PD1 |
| 381 | CTX-BiTE, ADA2, CCL21, anti-TGFβ, anti-TREM2 |
| 382 | CTX-BiTE, ADA2, CCL21, anti-PD1, anti-TREM2 |
| 383 | CTX-BiTE, ADA2, IL-12, anti-CD47, anti-TGFβ |
| 384 | CTX-BiTE, ADA2, IL-12, anti-CD47, anti-PD1 |
| 385 | CTX-BiTE, ADA2, IL-12, anti-CD47, anti-TREM2 |
| 386 | CTX-BiTE, ADA2, IL-12, anti-TGFβ, anti-PD1 |
| 387 | CTX-BiTE, ADA2, IL-12, anti-TGFβ, anti-TREM2 |
| 388 | CTX-BiTE, ADA2, IL-12, anti-PD1, anti-TREM2 |
| 389 | CTX-BiTE, ADA2, anti-CD47, anti-TGFβ, anti-PD1 |
| 390 | CTX-BiTE, ADA2, anti-CD47, anti-TGFβ, anti-TREM2 |
| 391 | CTX-BiTE, ADA2, anti-CD47, anti-PD1, anti-TREM2 |
| 392 | CTX-BiTE, ADA2, anti-TGFβ, anti-PD1, anti-TREM2 |
| 393 | CTX-BiTE, HYAL1, CHP, CCL21, IL-12 |
| 394 | CTX-BiTE, HYAL1, CHP, CCL21, anti-CD47 |
| 395 | CTX-BiTE, HYAL1, CHP, CCL21, anti-TGFβ |
| 396 | CTX-BiTE, HYAL1, CHP, CCL21, anti-PD1 |
| 397 | CTX-BiTE, HYAL1, CHP, CCL21, anti-TREM2 |
| 398 | CTX-BiTE, HYAL1, CHP, IL-12, anti-CD47 |
| 399 | CTX-BiTE, HYAL1, CHP, IL-12, anti-TGFβ |
| 400 | CTX-BiTE, HYAL1, CHP, IL-12, anti-PD1 |
| 401 | CTX-BiTE, HYAL1, CHP, IL-12, anti-TREM2 |
| 402 | CTX-BiTE, HYAL1, CHP, anti-CD47, anti-TGFβ |
| 403 | CTX-BiTE, HYAL1, CHP, anti-CD47, anti-PD1 |
| 404 | CTX-BiTE, HYAL1, CHP, anti-CD47, anti-TREM2 |
| 405 | CTX-BiTE, HYAL1, CHP, anti-TGFβ, anti-PD1 |
| 406 | CTX-BiTE, HYAL1, CHP, anti-TGFβ, anti-TREM2 |
| 407 | CTX-BiTE, HYAL1, CHP, anti-PD1, anti-TREM2 |
| 408 | CTX-BiTE, HYAL1, CCL21, IL-12, anti-CD47 |
| 409 | CTX-BiTE, HYAL1, CCL21, IL-12, anti-TGFβ |
| 410 | CTX-BiTE, HYAL1, CCL21, IL-12, anti-PD1 |
| 411 | CTX-BiTE, HYAL1, CCL21, IL-12, anti-TREM2 |
| 412 | CTX-BiTE, HYAL1, CCL21, anti-CD47, anti-TGFβ |
| 413 | CTX-BiTE, HYAL1, CCL21, anti-CD47, anti-PD1 |
| 414 | CTX-BiTE, HYAL1, CCL21, anti-CD47, anti-TREM2 |
| 415 | CTX-BiTE, HYAL1, CCL21, anti-TGFβ, anti-PD1 |
| 416 | CTX-BiTE, HYAL1, CCL21, anti-TGFβ, anti-TREM2 |
| 417 | CTX-BiTE, HYAL1, CCL21, anti-PD1, anti-TREM2 |
| 418 | CTX-BiTE, HYAL1, IL-12, anti-CD47, anti-TGFβ |
| 419 | CTX-BiTE, HYAL1, IL-12, anti-CD47, anti-PD1 |
| 420 | CTX-BiTE, HYAL1, IL-12, anti-CD47, anti-TREM2 |
| 421 | CTX-BiTE, HYAL1, IL-12, anti-TGFβ, anti-PD1 |
| 422 | CTX-BiTE, HYAL1, IL-12, anti-TGFβ, anti-TREM2 |
| 423 | CTX-BiTE, HYAL1, IL-12, anti-PD1, anti-TREM2 |
| 424 | CTX-BiTE, HYAL1, anti-CD47, anti-TGFβ, anti-PD1 |
| 425 | CTX-BiTE, HYAL1, anti-CD47, anti-TGFβ, anti-TREM2 |
| 426 | CTX-BiTE, HYAL1, anti-CD47, anti-PD1, anti-TREM2 |
| 427 | CTX-BiTE, HYAL1, anti-TGFβ, anti-PD1, anti-TREM2 |
| 428 | CTX-BiTE, CHP, CCL21, IL-12, anti-CD47 |
| 429 | CTX-BiTE, CHP, CCL21, IL-12, anti-TGFβ |
| 430 | CTX-BiTE, CHP, CCL21, IL-12, anti-PD1 |
| 431 | CTX-BiTE, CHP, CCL21, IL-12, anti-TREM2 |
| 432 | CTX-BiTE, CHP, CCL21, anti-CD47, anti-TGFβ |
| 433 | CTX-BiTE, CHP, CCL21, anti-CD47, anti-PD1 |
| 434 | CTX-BiTE, CHP, CCL21, anti-CD47, anti-TREM2 |
| 435 | CTX-BiTE, CHP, CCL21, anti-TGFβ, anti-PD1 |
| 436 | CTX-BiTE, CHP, CCL21, anti-TGFβ, anti-TREM2 |
| 437 | CTX-BiTE, CHP, CCL21, anti-PD1, anti-TREM2 |
| 438 | CTX-BiTE, CHP, IL-12, anti-CD47, anti-TGFβ |
| 439 | CTX-BiTE, CHP, IL-12, anti-CD47, anti-PD1 |
| 440 | CTX-BiTE, CHP, IL-12, anti-CD47, anti-TREM2 |
| 441 | CTX-BiTE, CHP, IL-12, anti-TGFβ, anti-PD1 |
| 442 | CTX-BiTE, CHP, IL-12, anti-TGFβ, anti-TREM2 |
| 443 | CTX-BiTE, CHP, IL-12, anti-PD1, anti-TREM2 |
| 444 | CTX-BiTE, CHP, anti-CD47, anti-TGFβ, anti-PD1 |
| 445 | CTX-BiTE, CHP, anti-CD47, anti-TGFβ, anti-TREM2 |
| 446 | CTX-BiTE, CHP, anti-CD47, anti-PD1, anti-TREM2 |
| 447 | CTX-BiTE, CHP, anti-TGFβ, anti-PD1, anti-TREM2 |
| 448 | CTX-BiTE, CCL21, IL-12, anti-CD47, anti-TGFβ |
| 449 | CTX-BiTE, CCL21, IL-12, anti-CD47, anti-PD1 |
| 450 | CTX-BiTE, CCL21, IL-12, anti-CD47, anti-TREM2 |
| 451 | CTX-BiTE, CCL21, IL-12, anti-TGFβ, anti-PD1 |
| 452 | CTX-BiTE, CCL21, IL-12, anti-TGFβ, anti-TREM2 |
| 453 | CTX-BiTE, CCL21, IL-12, anti-PD1, anti-TREM2 |
| 454 | CTX-BiTE, CCL21, anti-CD47, anti-TGFβ, anti-PD1 |
| 455 | CTX-BiTE, CCL21, anti-CD47, anti-TGFβ, anti-TREM2 |
| 456 | CTX-BiTE, CCL21, anti-CD47, anti-PD1, anti-TREM2 |
| 457 | CTX-BiTE, CCL21, anti-TGFβ, anti-PD1, anti-TREM2 |
| 458 | CTX-BiTE, IL-12, anti-CD47, anti-TGFβ, anti-PD1 |
| 459 | CTX-BiTE, IL-12, anti-CD47, anti-TGFβ, anti-TREM2 |
| 460 | CTX-BiTE, IL-12, anti-CD47, anti-PD1, anti-TREM2 |
| 461 | CTX-BiTE, IL-12, anti-TGFβ, anti-PD1, anti-TREM2 |
| 462 | CTX-BiTE, anti-CD47, anti-TGFβ, anti-PD1, anti-TREM2 |

[0355] In some embodiments, the recombinant oncolytic viruses described herein comprise at least one polynucleotide encoding a payload molecule that that reduces the expression or inhibits the function of an endogenous miRNA, a gene, or a tissue inhibitor of metalloproteinases (TIMP). Such recombinant oncolytic viruses are referred to herein as “genome-editing” or “microenvironment-remodeling” viruses or vectors. The encoded protein or oligonucleotide may reduce expression or inhibit the function of a miRNA, gene, or TIMP in any number of ways including targeting the protein (e.g., a TIMP) for degradation (e.g., by ubiquitination and proteosomal degradation or targeting for lysosomal degradation), blocking interactions with cognate receptors (e.g., blocking antibodies or antigen binding fragments thereof or peptide inhibitors), degrading messenger RNA transcripts (e.g., a short interfering RNA or short hairpin RNA), and/or altering the genomic DNA sequence encoding the specific miRNA, gene, or protein (e.g., by an endonuclease).

[0356] In particular embodiments, the protein or oligonucleotide reduces the expression of a miR or a gene involved in carcinogenesis or metastasis (e.g., an oncogenic miR or an oncogene). In some embodiments, a recombinant oncolytic virus comprises at least one polynucleotide encoding a payload molecule that reduces the expression or function of a miRNA that is an oncogenic miRNA (e.g., one or more of the miRNAs listed in Table 13). In some embodiments, the recombinant oncolytic virus comprises at least 1, 2, 3, 4, 5, 6, 7, 8, 9, 10 or more polynucleotides encoding for a protein or oligonucleotide that reduces the expression or function of an oncogenic miRNA. In some embodiments, the recombinant oncolytic virus comprises at least 1, 2, 3, 4, 5, 6, 7, 8, 9, 10 or more polynucleotides encoding for a plurality of proteins or oligonucleotides that reduce the expression or function of a plurality of oncogenic miRNAs. In some embodiments, the protein or oligonucleotide reduces the expression of miR-17-92 and is used to treat lung cancer (e.g., small-cell lung cancer). In other embodiments, the protein or oligonucleotide reduces the expression of miR-221 and/or miR-21 and is used to treat glioblastoma. In certain embodiments, the protein or oligonucleotide reduces the expression of miR-155 and/or miR-17-92 and is used to treat lymphoma (e.g., Burkitt's lymphoma, diffuse large B cell lymphoma, marginal zone lymphoma, or chronic lymphocytic leukemia). In some embodiments, the protein or oligonucleotide reduces the expression of miR-221, miR-222, and/or miR-146 and is used to treat thyroid cancer. In some embodiments, the protein or oligonucleotide reduces the expression of miR-372 and/or miR-373 and is used to treat testicular cancer (e.g., testicular germ cell tumors). In some embodiments, the protein or oligonucleotide reduces the expression of miR-18 and/or miR-224 and is used to treat liver cancer (e.g., hepatocellular carcinoma).

[0357] In some embodiments, recombinant viral vectors described herein comprise a polynucleotide encoding a payload molecule that degrades the tumor extracellular matrix (ECM), which in some aspects leads to enhanced viral spread. Matrix metalloproteinases (MMPs) are zinc-dependent proteases that are classified, based on their activity, into collagenases, gelatinases, stromelysins and matrilysins. These proteases are generally secreted as pro-enzymes (zymogens) and are activated by proteolytic removal of the pro-peptide pro-domain. The primary role that MMPs play in cancer is in the degradation of the ECM, which facilitates tumor invasion and metastasis. MMPs are also involved in tumor progression, epithelial to mesenchymal transition (EMT), and angiogenesis. MMPs are regulated by miRs as well as TIMPs, which comprise a family of four protease inhibitors (TIMP1, TIMP2, TIMP3, and TIMP4). A broad array of tumor microenvironments can be degraded by disrupting miRNAs or TIMPs that negatively regulate the MMP family with the recombinant viral vectors of the disclosure. Many of these interactions show that multiple MMPs are regulated by a single miRNA: e.g. let-7 regulates MMP-2, MMP-9, and MMP-14; miR-143 regulates MMP-2, MMP-9, and MMP-13; miR-218 regulates MMP-2, MMP-7, and MMP-9. Furthermore, the vast majority of MMPs may be regulated by a single TIMP master switch: e.g. TIMP1 is known to inhibit most all of the known MMPs and also promotes cell proliferation in a wide range of cell types; TIMP2 interacts with MMP-14 and MMP-2.

[0358] In some embodiments, the recombinant oncolytic viruses described herein comprise at least one polynucleotide encoding a protein or an oligonucleotide that reduces the expression or function of a miRNA that is capable of altering the extracellular matrix or capable of modulating a pathway that alters the extracellular matrix, particularly in a tumor microenvironment. A microenvironment remodeling miR, as used herein, refers to a miR. In some embodiments, the protein or oligonucleotide reduces the expression or function of one microenvironment remodeling miR. In some embodiments, the protein or oligonucleotide reduces the expression or function of at least 2, 3, 4, 5, 6, 7, 8, 9, or 10 or more microenvironment remodeling miRs. In some embodiments, the recombinant oncolytic virus comprises a plurality of polynucleotides encoding a plurality of protein or oligonucleotides that reduce the expression or function of a plurality of microenvironment remodeling miRs. In some embodiments, strategies described herein may be utilized by recombinant viral vectors of the present disclosure to knockdown or disrupt expression or function of miRs or TIMPs which negatively regulate MMPs. In some embodiments, a recombinant oncolytic virus reduces the expression of a TIMP selected from TIMP1, TIMP2, TIMP3 and TIMP4.

[0359] In some embodiments, the recombinant oncolytic viruses described herein comprise at least one polynucleotide encoding a protein or an oligonucleotide that reduces the expression or function of a gene in the host cell genome. In some aspects, the gene is an oncogenic gene. In some aspects, the gene encodes an oncogenic miR (e.g., a miRNA listed in Table 13), a microenvironment remodeling miR, or a negative regulator of ECM-degradation (e.g., a TIMP). Reduction of gene expression and/or function may be accomplished by at the level of transcription (e.g., mutating, deleting, or silencing the genomic DNA sequence) or at the level of translation (e.g., by inhibiting the production of the gene product through mRNA degradation). In some embodiments, the recombinant oncolytic viruses described herein comprise one or more polynucleotides that encode for nucleases that reduce the expression or function of a gene by enabling the mutation, deletion, or repression of transcription of a gene sequence. In specific embodiments, the nuclease is selected from a Clustered Regulatory Interspaced Short Palindromic Repeats (CRISPR)-associated endonuclease, a zinc-finger nuclease (ZFN) or a Transcription activator-like effector nuclease (TALEN). In non-limiting examples, a CRISPR-associated endonuclease is selected from SpCas9, SpCas9-HF1, SpCas9-HF2, SpCas9-HF3, SpCas9-HF4, SaCas9, FnCpf, FnCas9, eSpCas9, C2C1, C2C3, Cpf1, Cas1, Cas1B, Cas2, Cas3, Cas4, Cas5, Cas6, Cas7, Cas8, Cas9 (also known as Csn1 and Csx12), Cas10, Csy1, Csy2, Csy3, Cse1, Cse2, Csc1, Csc2, Csa5, Csn2, Csm2, Csm3, Csm4, Csm5, Csm6, Cmr1, Cmr3, Cmr4, Cmr5, Cmr6, Csb1, Csb2, Csb3, Csx17, Csx14, Csx10, Csx16, CsaX, Csx3, Csx1, Csx15, Csf1, Csf2, Csf3, and Csf4.

[0360] Recombinant viral vectors of the disclosure may utilize the CRISPR (Clustered Regularly Interspaced Short Palindromic Repeats)/Cas (CRISPR Associated) nuclease system, which is an engineered nuclease system based on a bacterial system that can be used for mammalian genome engineering. Generally, the system comprises a Cas nuclease and a guide RNA (gRNA). The gRNA is comprised of two parts; a crispr-RNA (crRNA) that is specific for a target genomic DNA sequence, and a tracr RNA (trRNA) that facilitates Cas binding. The crRNA and trRNA may be present as separate RNA oligonucleotides, or may be present in the same RNA oligonucleotide, referred to as a single guide-RNA (sgRNA). As used herein, the term “guide RNA” or “gRNA” refers to either the combination of an individual trRNA and an individual crRNA or an sgRNA. See, e.g., Jinek et al. (2012) Science 337:816-821; Cong et al. (2013) Science 339:819-823; Mali et al. (2013) Science 339:823-826; Qi et al. (2013) Cell 152:1173-1183; Jinek et al. (2013), eLife 2: e00471; David Segal (2013) eLife 2: e00563; Ran et al. (2013) Nature Protocols 8 (11): 2281-2308; Zetsche et al. (2015) Cell 163 (3): 759-771; PCT Publication Nos. WO 2007/025097, WO 2008/021207, WO 2010/011961, WO 2010/054108, WO 2010/054154, WO 2012/054726, WO 2012/149470, WO 2012/164565, WO 2013/098244, WO 2013/126794, WO 2013/141680, and WO 2013/142578; U.S. Patent Publication Nos. 2010-0093617, 2013-0011828, 2010-0257638, 2010-0076057, 2011-0217739, 2011-0300538, 2013-0288251, and 2012-0277120; and U.S. Pat. No. 8,546,553, each of which is incorporated herein by reference in its entirety.

[0361] Multiple class 1 CRISPR-Cas systems, which include the type I and type III systems, have been identified and functionally characterized in detail, revealing the complex architecture and dynamics of the effector complexes (Brouns et al., 2008, Marraffini and Sontheimer, 2008, Hale et al., 2009, Sinkunas et al., 2013, Jackson et al., 2014, Mulepati et al., 2014). In addition, several class 2-type II CRISPR-Cas systems that employ homologous RNA-guided endonucleases of the Cas9 family as effectors have also been identified and experimentally characterized (Barrangou et al., 2007, Garneau et al., 2010, Deltcheva et al., 2011, Sapranauskas et al., 2011, Jinek et al., 2012, Gasiunas et al., 2012). A second, putative class 2-type V CRISPR-Cas system has been recently identified in several bacterial genomes. The putative type V CRISPR-Cas systems contain a large, ˜1,300 amino acid protein called Cpf1 (CRISPR from Prevotella and Francisella 1).

[0362] In some embodiments, an oncolytic virus described herein further comprises at least one polynucleotide encoding a trRNA and crRNA targeted to the miRNA or the TIMP. In some cases, the at least one polynucleotide encoding a trRNA and crRNA is inserted into a locus on the viral genome. In some embodiments, the polynucleotide is an insulated sequence comprising a synthetic insulator or a native viral (e.g., HSV) insulator. In certain embodiments, an oncolytic virus is a herpes simplex virus and the at least one polynucleotide encoding an RNA binding site is inserted into or between one or more loci including the internal repeat joint region (comprising one copy each of the diploid genes ICP0, ICP34.5, LAT, ICP4, and the ICP47 promoter), ICP0, LAT, UL1, UL5, UL6, UL7, UL8, UL9, UL11, UL12, UL14, UL15, UL17, UL18, UL19, UL20, UL22, UL25, UL26, UL26.5, UL27, UL28, UL29, UL30, UL31, UL32, UL33, UL34, UL35, UL36, UL37, UL38, UL39, UL40, UL42, UL48, UL49, UL52, UL53, UL54, ICP0, ICP4, ICP22, ICP27, ICP47, gamma-34.5, US3, US4, US5, US6, US7, US8, US9, US10, US11, and US12. In one embodiment, an oncolytic virus is a herpes simplex virus (HSV) and the at least one polynucleotide encoding an RNA binding site is inserted into a locus between the UL3 and the UL4 open reading frames.

[0363] In some embodiments, the recombinant oncolytic virus comprises at least one polynucleotide encoding a payload molecule that activate or enhances an anti-tumor immune response. In some embodiments, the payload molecule is a cytokine, a chemokine, an antibody or antigen binding fragment thereof, a bispecific T-cell engager (BiTE). For example, in some embodiments, the payload molecule is an antibody or antigen binding fragments thereof that bind to and inhibit immune checkpoint receptors (e.g. CTLA4, LAG3, PD1, PDL1, and others). In some embodiments, the payload molecule is an anti-PD1 antibody or antigen-binding fragment thereof, an anti-PDL1 antibody or antigen-binding fragment thereof, or an anti-CTLA4 antibody or antigen-binding fragment thereof.

[0364] In some embodiments, the payload molecule comprises a PD1 antagonist. In some embodiments, the PD1 antagonist is an anti-PD1 antibody or antigen-binding fragment thereof. In some embodiments, the PD1 antagonist is an anti-PD1 nanobody.

[0365] In some embodiments, the payload molecule comprises IL12.

[0366] In some embodiments, the payload molecule is a protein that binds to and activates a cell-surface receptor. For example, in some embodiments, payload molecule comprises an endogenous cell-surface ligand, such as the extracellular domain of 41BBL, the extracellular domain of CD40L, FLT3L. In some embodiments, the payload molecule is a cytokine (e.g., IFNγ, IFNα, IFNβ, TNFα, IL-12, IL-2, IL-6, IL-8, IL-15, GM-CSF, IL-21, IL-35, TGFβ, and others) or chemokine (e.g., CCL4, CXCL10, CCL5, CXCL13, or XCL1).

[0367] In some embodiments, the payload molecule is a protein that binding to and activate an activating receptor (e.g., FcγRI, FcγIIa, FcγIIIa, costimulatory receptors, and others). In particular embodiments, the protein is selected from EpCAM, folate, A2A, anti-FGF2, anti-FGFR/FGFR2b, anti-SEMA4D, CD137, CD200, CD38, CD44, CSF-IR, endothelin B Receptor, ISRE7, LFA-1, NG2 (also known as SPEG4), SMADs, STING, and VCAM1.

[0368] In certain embodiments, a polynucleotide encoding a protein or an oligonucleotide targeted to reduce expression of an miRNA, a gene, or a TIMP is inserted into a locus on the viral genome of a recombinant oncolytic virus. In some embodiments, the polynucleotide is an insulated sequence comprising a synthetic insulator or a native viral (e.g., HSV) insulator. In certain embodiments, the oncolytic virus is a herpes simplex virus and the at least one polynucleotide encoding an RNA binding site is inserted into or between one or more loci including the internal repeat joint region (comprising one copy each of the diploid genes ICP0, ICP34.5, LAT, ICP4, and the ICP47 promoter), ICP0, LAT, UL1, UL5, UL6, UL7, UL8, UL9, UL11, UL12, UL14, UL15, UL17, UL18, UL19, UL20, UL22, UL25, UL26, UL26.5, UL27, UL28, UL29, UL30, UL31, UL32, UL33, UL34, UL35, UL36, UL37, UL38, UL39, UL40, UL42, UL48, UL49, UL52, UL53, UL54, ICP0, ICP4, ICP22, ICP27, ICP47, gamma-34.5, US3, US4, US5, US6, US7, US8, US9, US10, US11, and US12 . . . . In one embodiment, the virus is a herpes simplex virus (HSV) and the at least one polynucleotide is inserted into a locus between the UL3 and the UL4 open reading frames.

[0369] In some embodiments, the recombinant oncolytic virus comprises at least one polynucleotide encoding a payload molecule that inhibits immune suppression by myeloid cells in GBM. In some embodiments, the payload molecule comprises a CD47 antagonist, a TGFβ antagonist, an adenosine deaminase 2 (ADA2), a chemotaxis inhibitory protein (CHP), 15-hydroxyprostaglandin dehydrogenase [NAD(+)] (HPGD), sperm adhesion molecule 1 (SPAM1/HYAL5), or a biomolecule comprising a chlorotoxin (CTX). In some embodiments, the payload molecule comprises a CD47 antagonist. In some embodiments, the CD47 antagonist is an anti-CD47 antibody or antigen-binding fragment thereof. In some embodiments, the payload molecule comprises a TGFβ antagonist. In some embodiments, the TGFβ antagonist is an anti-TGFβ antibody or antigen-binding fragment thereof. In some embodiments, the payload molecule comprises an adenosine deaminase 2 (ADA2). In some embodiments, the payload molecule comprises a chemotaxis inhibitory protein (CHP/CHIPS). In some embodiments, the chemotaxis inhibitory protein is derived from Staphylococcus aureus. In some embodiments, the payload molecule comprises 15-hydroxyprostaglandin dehydrogenase [NAD(+)] (HPGD/PGDH). In some embodiments, the payload molecule comprises sperm adhesion molecule 1 (SPAM1/HYAL5). In some embodiments, the payload molecule comprises a biomolecule comprising a chlorotoxin (CTX). In some embodiments, the CTX is a scorpion CTX. In some embodiments, the biomolecule comprising chlorotoxin also comprises an antibody fragment. In some embodiments, the biomolecule comprising chlorotoxin also comprises an Fc domain (i.e., CTX-Fc). In some embodiments, the biomolecule comprising chlorotoxin also comprises a bispecific T cell engager (BiTE) or a bispecific light T-cell engager (LiTE) (i.e., CTX-BiTE or CTX-LITE).

[0370] In some embodiments, the recombinant oncolytic virus comprises at least one protease-activated antibody. Protease-activated antibodies, such as those described by Metz et al. (Protein Eng Des Sel, 25 (10): 571-80, 2012) are activated and bind only to targets following protease cleavage of a protective cap. In some instances, tumor microenvironments possess an array of proteases that are well differentiated from surrounding healthy tissues. For example, the protease cathepsin B is overexpressed in numerous cancers, including breast, cervix, colon, colorectal, gastric, head and neck, liver, lung, melanoma, ovarian, pancreatic, prostate, and thyroid cancer. The human degradome, comprised of a complete list of proteases synthesized by human cells, is made up of at least 569 proteases that are distributed into five broad classes (in order from greatest to least number): metalloproteinases (MMPs), serine, cysteine, threonine, and aspartic proteases (Lopez-Otin et al., Nat Rev Cancer, 7 (10): 800-8, 2007). In particular, protease antibodies specifically cleaved by MMPs can serve as an excellent means of targeting the recombinant viral vectors described herein to the tumor microenvironment, as MMPs are found in the extracellular and pericellular areas of the cell.

[0371] In certain embodiments, the protease-activated antibody is incorporated into the viral glycoprotein envelope. Protease-activated antibodies can be incorporated into the glycoprotein envelope of a recombinant viral vector of the disclosure (e.g., an HSV vector) to increase the therapeutic index and reduce off-target infection. In the case of an HSV vector, in some embodiments, the glycoprotein may be gC or gD. In some embodiments, the recombinant oncolytic viruses described herein comprise at least one polynucleotide encoding a protease-activated antibody. In certain embodiments, a protease-activated antibody is activated by a protease selected from a cysteine cathepsin, an aspartic cathepsin, a kallikrein (hK), a serine protease, a caspase, a matrix metalloproteinase (MMP), and a disintegrin and metalloproteinase (ADAM). In some embodiments, a protease is selected from cathepsin K, cathepsin B, cathepsin L, cathepsin E, cathepsin D, hK1, PSA (hK3), hK10, hK15, uPA, uPAR, MMP-1, MMP-2, MMP-3, MMP-7, MMP-8, MMP-9, MMP-10, MMP-11, MMP-12, MMP-13, MMP-14, MMP-15, MMP-16, MMP-17, MMP-18, MMP-19, MMP-20, MMP-21, MMP-23A, MMP-23B, MMP-24, MMP-25, MMP-26, MMP-27, or MMP-28.

[0372] In some embodiments, the protease-activated antibody binds a protein expressed more highly by cancer cells or in cancer microenvironments than by non-cancer cells or in non-cancer microenvironments. In certain aspects, a protease-activated antibody binds NKG2D, c-met, HGFR, CD8, heparan sulfate, VSPG4 (also known as NG2), EGFR, EGFRvIII, CD133, CXCR4, carcinoembryonic antigen (CEA), CLC-3, annexin II, human transferrin receptor, or EpCAM. In certain instances, multiple protease activated antibodies may be incorporated into a single viral vector particle to ensure that diverse tumor histotypes are targeted. For example, at least 1, 2, 3, 4, 6, 7, 8, 9, 10, or more protease activated antibodies may be incorporated into the viral glycoprotein envelope. In some embodiments, the recombinant oncolytic virus comprises at least 1, 2, 3, 4, 5, 6, 7, 8, 9, 10, or more polynucleotides that encodes for at least 1, 2, 3, 4, 5, 6, 7, 8, 9, 10, or more protease activated antibodies. In some embodiments, an oncolytic virus comprises a first protease-activated antibody that binds a first protein expressed more highly by cancer cells or in cancer microenvironments than by non-cancer cells or in non-cancer microenvironments, and a second protease-activated antibody that binds a second protein expressed more highly by cancer cells or in cancer microenvironments than by non-cancer cells or in non-cancer microenvironments. In further embodiments, an oncolytic virus comprises a plurality of protease-activated antibodies binding a plurality of protein expressed more highly by cancer cells or in cancer microenvironments than by non-cancer cells or in non-cancer microenvironments. An oncolytic virus comprises, for example, a protease-activated antibody that is a human antibody, a humanized antibody or a chimeric antibody. In some embodiments, an oncolytic virus comprises an antibody that is a full-length immunoglobulin, an scFv, a Fab, a Fab′, an F(ab′)2, an Fv, a diabody, a triabody, a minibody, a single-domain antibody, or a multispecific antibody.

[0373] In some embodiments, a recombinant oncolytic virus comprises one or more of: one or more micro-RNA (miR) target sequences inserted into a locus of one or more viral genes required for viral replication; one or more polynucleotides encoding one or more proteins or oligonucleotides, wherein the proteins or oligonucleotides reduce the expression or inhibit the function of a miR, a gene, or a TIMP; at least one protease-activated antibody; and/or a polynucleotide encoding at least one protease activated antibody. In some embodiments, a recombinant oncolytic virus comprises: a plurality of copies of one or more miRNA target sequences inserted into a locus of a viral gene required for viral replication in non-cancerous cells; and/or a first polynucleotide encoding a protein or an oligonucleotide targeted to reduce expression of an oncogenic miRNA or an oncogenic gene; and/or a second polynucleotide encoding a protein or an oligonucleotide targeted to reduce expression of a microenvironment remodeling miRNA or a TIMP. In some embodiments, a recombinant oncolytic virus comprises: a plurality of copies of one or more miRNA target sequences inserted into a locus of a viral gene required for viral replication in non-cancerous cells; and/or a polynucleotide encoding a protein or an oligonucleotide targeted to reduce expression of an oncogenic miRNA or an oncogenic gene; and/or at least one protease-activated antibody. In further embodiments, a recombinant oncolytic virus comprises a plurality of copies of one or more miRNA target sequences inserted into a locus of a viral gene required for viral replication in non-cancerous cells; and/or a polynucleotide encoding a protein or an oligonucleotide targeted to reduce expression of a microenvironment remodeling miRNA or a TIMP; and/or at least one protease-activated antibody. In one embodiment, a recombinant oncolytic virus comprises a plurality of copies of one or more miRNA target sequences inserted into a locus of a viral gene required for viral replication in non-cancerous cells; and/or a first polynucleotide encoding a protein or an oligonucleotide targeted to reduce expression of an oncogenic miRNA or an oncogenic gene; and/or a second polynucleotide encoding a protein or an oligonucleotide targeted to reduce expression of a microenvironment remodeling miRNA or a TIMP; and/or at least one protease-activated antibody. In some specific embodiments, an oncolytic virus described in this paragraph is a herpes simplex virus and the viral gene required for viral replication in non-cancerous cells is UL1, UL5, UL6, UL7, UL8, UL9, UL11, UL12, UL14, UL15, UL17, UL18, UL19, UL20, UL22, UL25, UL26, UL26.5, UL27, UL28, UL29, UL30, UL31, UL32, UL33, UL34, UL35, UL36, UL37, UL38, UL39, UL40, UL42, UL48, UL49, UL52, UL53, UL54, ICP0, ICP4, ICP22, ICP27, ICP47, gamma-34.5, US3, US4, US5, US6, US7, US8, US9, US10, US11, and US12.

[0374] In certain aspects, the disclosure relates to a recombinant oncolytic virus comprising a first polynucleotide encoding a protein or an oligonucleotide targeted to reduce expression of an oncogenic miRNA or an oncogenic gene; and a second polynucleotide encoding a protein or an oligonucleotide targeted to reduce expression of a microenvironment remodeling miRNA or a TIMP. In other embodiments, a recombinant oncolytic virus comprises a polynucleotide encoding a protein or an oligonucleotide targeted to reduce expression of an oncogenic miRNA or an oncogenic gene; and at least one protease-activated antibody. In some embodiments, a recombinant oncolytic virus comprises a polynucleotide encoding a protein or an oligonucleotide targeted to reduce expression of a microenvironment remodeling miRNA or a TIMP; and at least one protease-activated antibody. In one embodiment, a recombinant oncolytic virus comprises a first polynucleotide encoding a protein or an oligonucleotide targeted to reduce expression of an oncogenic miRNA or an oncogenic gene; and/or a second polynucleotide encoding a protein or an oligonucleotide targeted to reduce expression of a microenvironment remodeling miRNA or a TIMP; and/or at least one protease-activated antibody.

### Codon-Optimization and ORF G/C Content

[0375] In some embodiments, the oncolytic virus of the disclosure comprises one or more transgenes having relatively high G/C content.

[0376] Without wishing to be bound by any particular theory, it is contemplated that transgene(s) having relatively high G/C content in the open reading frame (ORF; also known as the coding region) have significantly higher expression of the corresponding payload molecule as compared to transgenes having lower G/C content in the ORF when incorporated into the recombinant herpesvirus of the disclosure.

[0377] As used herein, the term “guanosine/cytosine content” or “G/C content” refers to the percentage of nitrogenous bases in a DNA or RNA molecule that are either guanine (G) or cytosine (C).

[0378] In some embodiments, the G/C content of the ORF of the one or more transgenes described herein is increased compared to the G/C content of the corresponding wild type (unmodified) coding region. The encoded amino acid sequence of the ORF is preferably not modified compared to the encoded amino acid sequence of the corresponding wild type (unmodified) coding region. This can be achieved by codon optimization. Methods for codon optimization are known in the art.

[0379] Depending on the amino acid to be encoded by the coding region of the modified RNA as defined herein, there are various possibilities for modification of the ORF to increase its G/C ontent compared to that of the wild type ORF.

[0380] In some embodiments, for amino acids that encoded by codons containing exclusively G or C nucleotides, no modification of the codon is necessary. In some embodiments, the codons for Pro (CCC or CCG), Arg (CGC or CGG), Ala (GCC or GCG) and Gly (GGC or GGG) require no modification.

[0381] In some embodiments, codons containing A and/or T/U nucleotides can be modified by substitution of other codons which code for the same amino acids but contain no A and/or T/U. For example:
[0382] the codons for Pro can be modified from CCT or CCA to CCC or CCG;
[0383] the codons for Arg can be modified from CGT or CGA or AGA or AGG to CGC or CGG;
[0384] the codons for Ala can be modified from GCT or GCA to GCC or GCG;
[0385] the codons for Gly can be modified from GGT or GGA to GGC or GGG.

[0386] In some embodiments, although A or T/U nucleotides cannot be eliminated from the codons, it is possible to decrease the A and T/U content by using codons containing a lower content of A and/or T/U nucleotides. For example:
[0387] the codons for Phe can be modified from TTT to TTC;
[0388] the codons for Leu can be modified from TTA, TTG, CTT or CTA to CTC or CTG;
[0389] the codons for Ser can be modified from TCT or TCA or AGT to TCC, TCG or AGC;
[0390] the codon for Tyr can be modified from TAT to TAC;
[0391] the codon for Cys can be modified from TGT to TGC;
[0392] the codon for His can be modified from CAT to CAC;
[0393] the codon for Gln can be modified from CAA to CAG;
[0394] the codons for Ile can be modified from ATT or ATA to ATC;
[0395] the codons for Thr can be modified from ACT or ACA to ACC or ACG;
[0396] the codon for Asn can be modified from AAT to AAC;
[0397] the codon for Lys can be modified from AAA to AAG;
[0398] the codons for Val can be modified from GTT or GTA to GTC or GTG;
[0399] the codon for Asp can be modified from GAT to GAC;
[0400] the codon for Glu can be modified from GAA to GAG;
[0401] the stop codon UAA can be modified to TAG or TGA.

[0402] In some embodiments, the codons for Met (ATG) and Trp (TGG) are not modified.

[0403] The substitutions listed above can be used either individually or in any possible combination to increase the G/C content of the coding region of the ORF, compared to the starting sequence (e.g., the wild type ORF).

[0404] In some embodiments, the G/C content of the ORF of the one or more transgenes described herein is increased by at least 5%, at least 10%, at least 15%, at least 20%, at least 25%, or at least 30%, compared to the G/C content of the wild type coding region or the starting ORF sequence. In some embodiments, at least 5%, at least 10%, at least 20%, at least 30%, at least 40%, at least 50%, at least 60%, at least 70%, at least 80%, at least 90%, at least 95%, or even 100% of the substitutable codons in the ORF of the one or more transgenes are substituted, thereby increasing the G/C content of said ORF.

[0405] In some embodiments, the codon optimization further comprises removing the “rare codons” present in the ORF and replacing it by a codon which codes for a tRNA which is relatively frequent in the cell and carries the same amino acid as the relatively rare tRNA. Which tRNAs occur relatively frequently in the cell and which, in contrast, occur relatively rarely is known to a person skilled in the art; see, e.g., Akashi, Curr. Opin. Genet. Dev. 2001, 11 (6): 660-666, which is incorporated by reference in its entirety for all purposes.

[0406] In some embodiments, the ORF of at least one of the transgene(s) of the oncolytic virus described herein has G/C content of at least 60%. In some embodiments, the ORF of at least one of the transgene(s) of the oncolytic virus described herein has G/C content of at least 61%. In some embodiments, the ORF of at least one of the transgene(s) of the oncolytic virus described herein has G/C content of at least 62%. In some embodiments, the ORF of at least one of the transgene(s) of the oncolytic virus described herein has G/C content of at least 63%. In some embodiments, the ORF of at least one of the transgene(s) of the oncolytic virus described herein has G/C content of at least 64%. In some embodiments, the ORF of at least one of the transgene(s) of the oncolytic virus described herein has G/C content of at least 59%. In some embodiments, the ORF of at least one of the transgene(s) of the oncolytic virus described herein has G/C content of at least 56%, at least 57%, at least 58%, at least 59%, at least 60%, at least 61%, at least 62%, at least 63%, at least 64%, at least 65%, at least 66%, at least 67%, at least 68%, at least 69%, or at least 70%. In some embodiments, the ORF of at least one of the transgene(s) of the oncolytic virus described herein has G/C content of about 60%, about 61%, about 62%, about 63%, about 64%, about 65%, about 66%, about 67%, about 68%, about 69%, or about 70%. In some embodiments, the ORF of at least one of the transgene(s) of the oncolytic virus described herein has G/C content of between 56%-57%, 57%-58%, 58%-59%, 59%-60%, 60%-61%, 61%-62%, 62%-63%, 63%-64%, 64%-65%, 65%-66%, 66%-67%, 67%-68%, 68%-69%, 69%-70%, 56%-58%, 57%-59%, 58%-60%, 59%-61%, 60%-62%, 61%-63%, 62%-64%, 63%-65%, 64%-66%, 65%-67%, 66%-68%, 67%-69%, 68%-70%, 56%-59%, 57%-60%, 58%-61%, 59%-62%, 60%-63%, 61%-64%, 62%-65%, 63%-66%, 64%-67%, 65%-68%, 66%-69%, 67%-70%, 56%-60%, 57%-61%, 58%-62%, 59%-63%, 60%-64%, 61%-65%, 62%-66%, 63%-67%, 64%-68%, 65%-69%, 66%-70%, 56%-61%, 57%-62%, 58%-63%, 59%-64%, 60%-65%, 61%-66%, 62%-67%, 63%-68%, 64%-69%, 65%-70%, 56%-62%, 57%-63%, 58%-64%, 59%-65%, 60%-66%, 61%-67%, 62%-68%, 63%-69%, 64%-70%, 56%-63%, 57%-64%, 58%-65%, 59%-66%, 60%-67%, 61%-68%, 62%-69%, 63%-70%, 56%-64%, 57%-65%, 58%-66%, 59%-67%, 60%-68%, 61%-69%, 62%-70%, 56%-65%, 57%-66%, 58%-67%, 59%-68%, 60%-69%, 61%-70%, 56%-66%, 57%-67%, 58%-68%, 59%-69%, 60%-70%, 56%-67%, 57%-68%, 58%-69%, 59%-70%, 56%-68%, 57%-69%, 58%-70%, 56%-69%, 57%-70%, or 56%-70%. In some embodiments, the at least one of the transgene(s) of the oncolytic virus are at least 2, at least 3, at least 4, at least 5 transgenes, at least 6 transgenes. In some embodiments, the at least one of the transgene(s) of the oncolytic virus are 1, 2, 3, 4, 5, 6, 7, 8, 9, 10, or 11 transgenes. In some embodiments, the at least one of the transgene(s) of the oncolytic virus are all the transgenes. In some embodiments, the at least one of the transgene(s) of the oncolytic virus comprise one or more transgenes encoding IL-12, a PD1 antagonist, a TREM2 antagonist, HPGD, and/or a biomolecule comprising CTX. In some embodiments, the at least one of the transgene(s) of the oncolytic virus comprise transgenes encoding IL-12, a PD1 antagonist, and a TREM2 antagonist. In some embodiments, the at least one of the transgene(s) of the oncolytic virus comprise transgenes encoding IL-12, a PD1 antagonist, a TREM2 antagonist, and HPGD. In some embodiments, the at least one of the transgene(s) of the oncolytic virus comprise transgenes encoding IL-12, a PD1 antagonist, a TREM2 antagonist, and a biomolecule comprising CTX. In some embodiments, the at least one of the transgene(s) of the oncolytic virus comprise transgenes encoding IL-12, a PD1 antagonist, a TREM2 antagonist, HPGD, and a biomolecule comprising CTX.

[0407] In some embodiments, the expression of a payload molecule encoded by the ORF of the transgene in the oncolytic virus described herein is at least 2-fold, at least 3-fold, at least 5-fold, at least 8-fold, or at least 10-fold higher than the expression of the payload protein encoded by a control ORF encoding the same payload molecule in a control oncolytic virus. In some embodiments, the expression of a payload molecule encoded by the ORF of the transgene is at least 2-fold higher than the expression of the payload protein encoded by the control ORF. In some embodiments, the expression of a payload molecule encoded by the ORF of the transgene is at least 3-fold higher than the expression of the payload protein encoded by the control ORF. In some embodiments, the expression of a payload molecule encoded by the ORF of the transgene is at least 5-fold higher than the expression of the payload protein encoded by the control ORF. In some embodiments, the expression of a payload molecule encoded by the ORF of the transgene is at least 8-fold higher than the expression of the payload protein encoded by the control ORF. In some embodiments, the expression of a payload molecule encoded by the ORF of the transgene is at least 10-fold higher than the expression of the payload protein encoded by the control ORF. A skilled person would readily recognize the proper control ORF/control virus. In some embodiments, the control ORF comprises a wildtype polynucleotide sequence encoding the payload protein. In some embodiments, the control ORF is codon optimized based on the codon usage of Homo sapiens. In some embodiments, the control ORF has a G/C content of no more than 55%, no more than 54%, no more than 53%, no more than 52%, no more than 51%, no more than 50%, no more than 49%, no more than 48%, or no more than 47%. In some embodiments, the control ORF has a G/C content of about 55%, about 54%, about 53%, about 52%, about 51%, about 50%, about 49%, about 48%, or about 47%. In some embodiments, the control ORF has a G/C content of about 50%. In some embodiments, the control ORF has a G/C content of about 52%.

[0408] In some embodiments, the ORF(s) of the one or more transgene(s) are codon optimized based on the codon usage of an aryl-halorespiring facultative anaerobic myxobacterium. In some embodiments, the ORF(s) of the one or more transgene(s) are codon optimized based on the codon usage of Anaeromyxobacter dehalogenans.

[0409] In some embodiments, one or more of the high G/C content ORFs encode an antibody or antigen binding fragment thereof. In some embodiments, the antibody or antigen binding fragment thereof comprises a heavy chain variable domain (VH) and a light chain variable domain (VL). In some embodiments, the antibody or antigen binding fragment thereof comprises a single chain variable fragment (scFv). In some embodiments, the antibody or antigen binding fragment thereof comprises a VHH domain derived from a single domain antibody (sdAb). In some embodiments, the antibody or antigen binding fragment thereof comprises an IgG-Fc. Inn some embodiments, the IgG is IgG1. In some embodiments, the ORF encodes a TREM2 binding antibody or antigen binding fragment thereof and comprises a polynucleotide sequence at least 90%, at least 95%, at least 97%, at least 98%, at least 99%, or 100% identical to SEQ ID NO: 938. In some embodiments, the ORF encodes a PD1 antagonist and comprises a polynucleotide sequence at least 90%, at least 95%, at least 97%, at least 98%, at least 99%, or 100% identical to SEQ ID NO: 937. In some embodiments, the ORF encodes a biomolecule comprising CTX and comprises a polynucleotide sequence at least 90%, at least 95%, at least 97%, at least 98%, at least 99%, or 100% identical to SEQ ID NO: 940 or 941.

[0410] In some embodiments, one or more of the high G/C content ORFs encode a cytokine, a chemokine, a receptor, a receptor ligand, an enzyme, and/or a reporter protein. In some embodiments, the ORF encodes IL-12 and comprise a polynucleotide sequence at least 90%, at least 95%, at least 97%, at least 98%, at least 99%, or 100% identical to SEQ ID NO: 936. In some embodiments, the ORF encodes HPGD and comprises a polynucleotide sequence at least 90%, at least 95%, at least 97%, at least 98%, at least 99%, or 100% identical to SEQ ID NO: 939.

### Retargeting

[0411] In some embodiments, the recombinant oncolytic viruses described herein comprise a retargeting domain. In some embodiments, the recombinant oncolytic viruses described herein comprise the retargeting domain inserted in one of the virus proteins (e.g., gD). In some embodiments, the recombinant oncolytic viruses described herein comprise a polynucleotide encoding the retargeting domain. In some embodiments, the retargeting domain specifically binds a target protein expressed by a target cell. In some embodiments, the target cell is a cancer cell. In some embodiments, the target cell is a glioblastoma cell. In some embodiments, the retargeting domain enables, or enhances the ability of, the oncolytic virus to infect the target cell.

[0412] In some embodiments, the retargeting domain enables the oncolytic virus to infect target cells that are resistant to a control oncolytic virus without the retargeting domain. For example, Nectin-1 is an entry receptor for herpes simplex virus. Cells without (or with minimal) Nectin-1 expression are usually resistant to HSV. More discussion of the Nectin-1 expression and herpes simplex virus infection can be found, for example, in Guzman et al., Acta Virol. 2006; 50 (1): 59-66; Ishino et al., Blood (2019) 134 (Supplement_1): 3242; Friedman et al., Sci. Rep. (2018) 8:13930; and Alayo et al., Sci Rep. (2020); 10:5095, the content of each of which is incorporated by reference in its entirety for all purposes.

[0413] In some embodiments, incorporating the retargeting domain into HSV enables the virus to infect cells expressing the target protein but not Nectin-1.

[0414] In some embodiments, to insert the retargeting domain into the oncolytic virus, a polynucleotide encoding the retargeting domain is incorporated into the corresponding region of the viral genome of the virus. In some embodiments, the polynucleotide encoding the retargeting domain is inserted into the open reading frame of a US6 gene encoding a glycoprotein D (gD). In some embodiments, the the polynucleotide encoding the retargeting domain replaces the US6 gene region encoding an amino acid sequence corresponding to amino acids 6-24 of SEQ ID NO: 921.

[0415] In some embodiments, the target protein expressed by the target cell comprises one or more integrins. In some embodiments, the target protein comprises integrin α5β1, integrin αvβ1, integrin αvβ3, integrin αvβ6, or a combination thereof. In some embodiments, the target protein comprises integrin α5β1. In some embodiments, the target protein comprises integrin αvβ1. In some embodiments, the target protein comprises integrin αvβ3. In some embodiments, the target protein comprises integrin αvβ6.

[0416] In some embodiments, the target protein expressed by the target cell comprises epidermal growth factor receptor (EGFR), or a mutant thereof. In some embodiments, the target protein comprises EGFR. In some embodiments, the target protein comprises EGFR variant III (EGFRvIII). Description of EGFR variant III can be found, for example, in Padfield et al., Front Oncol. 2015; 5:5, the content of which is incorporated by reference in its entirety for all purposes.

[0417] In some embodiments, the retargeting domain comprises a knottin peptide capable of specifically binding to the target protein expressed by the target cell. Knottins, or inhibitor cystine knots (ICKs), are a family of ultra-stable miniproteins characterized by the presence of at least three interwoven disulfide bridges, which form an intramolecular knot and confer them structural and functional resistance to high temperature, enzymatic degradation, extreme pH and mechanical stress. Typically, knottins are about 30-50 residues in length. Description of knottins, and a database (KNOTTIN) that stores knottin sequences, structures, and functions, can be found, for example, in Postic et al., Nucleic Acids Res. 2018 Jan. 4; 46 (D1): D454-D458, the content of which is incorporated by reference in its entirety for all purposes. In some embodiments, the retargeting domain comprising knottin has no more than 50, no more than 45, no more than 40, or no more than 35 amino acids. In some embodiments, the knottin domain is derived from Ecballium elaterium trypsin inhibitor II (EETI-II trypsin inhibitor). In some embodiments, the knottin domain comprises an amino acid sequence having at least 80%, at least 85%, at least 90%, or 100% identity to SEQ ID NO: 922. In some embodiments, the knottin domain binds to one or more integrins (e.g., integrin α5β1, integrin αvβ1, integrin αvβ3, integrin αvβ6, or a combination thereof).

[0418] In some embodiments, the retargeting domain comprises an immunoglobulin domain capable of specifically binding to the target protein expressed by the target cell. In some embodiments, the retargeting domain comprises a binding domain of, or a binding domain derived from, a variable domain of a heavy chain-only antibody (VHH) or a variable fragment of new antigen receptor immunoglobulin (V-NAR). In some embodiments, the retargeting domain comprises no more than 150, no more than 140, or no more than 130 amino acids. In some embodiments, the retargeting domain comprises no more than 150 amino acids. In some embodiments, the retargeting domain comprises between 110-150 amino acids. In some embodiments, the retargeting domain comprises an amino acid sequence having at least 80%, at least 85%, at least 90%, or 100% identity to SEQ ID NO: 923. In some embodiments, the knottin domain binds to EGFR and/or a mutant thereof (e.g., EGFRvIII).

[0419] In some embodiments, the retargeting domain comprises no more than 50, no more than 45, no more than 40, or no more than 35 amino acids. In some embodiments, the retargeting domain comprises no more than 150, no more than 140, or no more than 130 amino acids. In some embodiments, the retargeting domain comprises between 110-150 amino acids.

[0420] In some embodiments, the oncolytic virus (e.g., HSV) comprising the retargeting domain (and/or a polynucleotide encoding the retargeting domain) is capable of infecting the target cell expressing the target protein. In some embodiments, the target cell is a glioblastoma cell. In some embodiments, the glioblastoma cell has no Nectin-1 expression. In some embodiments, the target cell is a Vero cell with no Nectin-1 expression (e.g., Nectin-1 knock-out cells). In some embodiments, the target cell expresses EGFR. In some embodiments, the target cell expresses an EGFR mutant (e.g., EGFRvIII). In some embodiments, the target cell expresses one or more integrins (e.g., integrin α5β1, integrin αvβ1, integrin αvβ3, integrin αvβ6, or a combination thereof).

### Replication Fidelity and Acyclovir Sensitivity

[0421] In some embodiments, the recombinant oncolytic virus described herein comprises a mutation that increases the replication fidelity of the viral genome. In some embodiment, the mutation is located within the DNA polymerase.

[0422] The UL30 viral gene of herpesvirus encodes a DNA polymerase catalytic subunit (DPCS). In some embodiments, the encoded DPCS comprises a mutation. In some embodiments, the mutation in DPCS increases the replication fidelity of the herpesvirus. In some embodiments, the mutation in the DPCS increases DNA replication fidelity of the herpesvirus by at least 10%, at least 20%, at least 30%, at least 50%, at least 100%, at least 2-fold, at least 3-fold, or at least 5-fold. In some embodiments, the mutation in the DPCS increases DNA replication fidelity of the herpesvirus by at least 1-fold. In some embodiments, the mutation in the DPCS comprises a mutation at the amino acid position corresponding to L774 of SEQ ID NO: 917. In some embodiments, the mutation is an amino acid substitution. In some embodiments, the mutation comprises the amino acid substitution corresponding to L774F of SEQ ID NO: 917. In some embodiments, the encoded DPCS comprises an amino acid sequence at least 90%, at least 95%, at least 97%, at least 98%, at least 99%, or 100% identical to SEQ ID NO: 917, except for the mutation at the amino acid position corresponding to L774 of SEQ ID NO: 917. Discussion about the DPCS mutation can be found, for example, in Hwang et al., J Virol. 2004 January; 78 (2): 650-657, the content of which is incorporated by reference in its entirety for all purposes.

[0423] In some embodiments, the mutation in the DPCS undesirably decreases the herpesvirus' sensitivity to acyclovir and its analogues, even though it increases replication fidelity. Acyclovir and/or its analogues are anti-HSV drugs which can be used as a safety measure to control the unwanted dissemination of oncolytic HSV (oHSV) infection (e.g., to non-cancerous cells in CNS). These drugs may also be used as an imaging tool to locate the HSV infection site in vivo. More description of acyclovir and its analogues can be found, for example, in Klysik et al., Curr Med Chem. 2020; 27 (24): 4118-4137, the content of which is incorporated by reference in its entirety for all purposes.

[0424] Accordingly, in some embodiments, the recombinant herpesvirus of the disclosure further comprises a mutation that partially or completely restores, or even enhances, its sensitivity to acyclovir. In some embodiments, the mutation is located in the UL23 viral gene and results in a mutation in the thymidine kinase (TK) encoded by UL23. In some embodiments, the mutation in the TK is at one or more amino acid positions corresponding to L159, 1160, F161, A168 and/or L169 of SEQ ID NO: 918. In some embodiments, the mutation in the TK is at 2, 3, 4, or 5 amino acid positions selected from those corresponding to L159, I160, F161, A168 and/or L169 of SEQ ID NO: 918. In some embodiments, the mutation(s) are amino acid substitution(s). In some embodiments, the mutation(s) in the TK comprise one or more amino acid substitutions of:
[0425] (a) L159I or L159L;
[0426] (b) I160L or I160F;
[0427] (c) F161A, F161V, F161P, or F161L;
[0428] (d) A168D, A168Y, A168V or A168F; and/or
[0429] (e) L169F, L169Y, L169L, L169I, L169M, L169N, or L169K.

[0430] In some embodiments, the mutation in the TK comprises amino acid substitutions corresponding to L159I, 1160F, F161L, A168F and L169M of SEQ ID NO: 918. In some embodiments, the mutation in the TK comprises amino acid substitutions corresponding to I160F, F161A, and A168F of SEQ ID NO: 918. In some embodiments, the mutation in the TK comprises amino acid substitutions corresponding to 1160F, F161L, A168F, and L169N of SEQ ID NO: 918. In some embodiments, the TK comprises an amino acid sequence at least 90%, at least 95%, at least 97%, at least 98%, at least 99%, or 100% identical to SEQ ID NO: 918, except the TK mutation(s) recited in this paragraph. More discussion about the TK mutation(s) can be found, for example, in Black et al., Cancer Res. 2001 Apr. 1; 61 (7): 3022-6, the content of which is incorporated by reference in its entirety for all purposes.

[0431] The efficacy of acyclovir may be significantly reduced in cells infected with herpesvirus that are more resistant (e.g., has high IC90/IC50) to acyclovir (e.g., HSV comprising the DPCS L774F mutation). This issue may be more prominent in HSVs that are derived from a strain that is intrinsically less sensitive to acyclovir, such as the HSV-Macintyre strain. The bioavailability of acyclovir, when dosed orally, is about 1.76 ug/ml in the central nervous system of human. Accordingly, in some embodiments, the recombinant herpesvirus of the disclosure has an acyclovir IC50 that is less than 0.5 ug/ml, less than 1.0 ug/ml, less than 1.5 ug/ml, or less than 2.0 ug/ml. In some embodiments, the recombinant herpesvirus of the disclosure has an acyclovir IC50 that is less than 0.5 ug/ml. In some embodiments, the recombinant herpesvirus of the disclosure has an acyclovir IC50 that is less than 0.4 ug/ml. In some embodiments, the recombinant herpesvirus of the disclosure has an acyclovir IC50 that is less than 0.3 ug/ml. In some embodiments, the recombinant herpesvirus of the disclosure has an acyclovir IC50 that is less than 0.2 ug/ml. In some embodiments, the mutation(s) in the TK decrease the IC50 of acyclovir for the herpesvirus by at least 1-fold, at least 2-fold, at least 5-fold, at least 10-fold, at least 20-fold, at least 50-fold, or at least 100-fold. In some embodiments, the mutation(s) in the TK decrease the IC50 of acyclovir for the herpesvirus by at least 10-fold. Determination of acyclovir IC90/IC50 is known in the art and also described in Example 6 below.

[0432] This solution for reverting the acyclovir resistance caused by the UL30 mutation(s) relates to the surprising finding that the complementary mutation(s) of TK encoded by UL23 do not compromise the fitness of the virus described herein, even though such mutation(s) of TK likely lower the TK's affinity for the native ligand thymidine (and thus a skilled artisan would expect to instead observe lower virus fitness, similar to what was observed when the TK was knock-out or knock-down). Without wishing to be bound by any particular theory, it is hypothesized that the the complementary mutation(s) introduced into TK lower the availability of the thymidine enzymatic product to a level enough to re-sensitize the mutant DPCS to the presence of low level acyclovir, yet the mutant TK still provides sufficient enzymatic product to maintain the replication fidelity of the mutant DPCS and the overall virus fitness.

[0433] In one aspect, the recombinant herpesvirus of the disclosure and a small molecule such as acyclovir can be used together in a method of imaging the infection site of the herpesvirus (e.g., a tumor site) in vivo. In some embodiments, the method comprising administering the recombinant herpesvirus of the disclosure and a small molecule (e.g., acyclovir). In some embodiments, the small molecule is radioisotope labeled acyclovir. In some embodiments, the radioisotope label comprises fluorine-18 (18F) label.

### Syncytial Mutants and Virus Production

[0434] In one aspect, the oncolytic virus of the disclosure has enhanced fusogenicity. In some embodiments, the oncolytic virus of the disclosure causes higher degree of syncytial formation upon infecting the target cells compared to a control oncolytic virus without enhanced fusogenicity.

[0435] For oncolytic viruses, enhanced fusogenicity induces cell-cell fusion resulting in formation of a syncytium, improves oncolysis and virus spread in tumor cells and enhance immunogenicity through releasing immunostimulatory DAMPs (damage-associated molecular patterns). As used herein, the term “syncytium” refers to a cell-cell fusion which appears in a tissue biopsy or tissue culture sample as a large acellular area with multiple nucleii, i.e., a multinucleate region of cytoplasm.

[0436] The term “syncytial mutation” refers to a mutation that increases the ability of the polypeptide to induce syncytium formation (i.e., “enhanced fusogenic activity” or “enhanced fusogenicity”). In some embodiments, the syncytial mutation increases the ability of the polypeptide to induce syncytium formation by at least 10%, at least 20%, at least 30%, at least 50%, at least 100%, at least 2-fold, at least 3-fold, at least 5-fold, at least 10-fold, at least 50-fold, or at least 100-fold, compared to a control polypeptide without the syncytial mutation. In some embodiments, the syncytial mutation increases the ability of the polypeptide to induce syncytium formation by at least 100% compared to a control polypeptide without the syncytial mutation. The induction of syncytium formation may be measured based on the number of cells that are induced to form a syncytium. Methods for measuring the fusogenicity (ability to induce syncytium formation) of a polypeptide are known in the art, for example, see Melancon et al., J Virol. 2005 January; 79 (1): 299-313, the content of which is incorporated by reference in its entirety for all purposes.

[0437] For HSV, enhancing fusogenicity through introducing syncytial mutation(s) into gK, gB, UL20 and/or UL24 is described, for example, in US20210386807 and Fan et al., Sci Rep. 2017 Mar. 3; 7:43712, the content of each of which is incorporated by reference in its entirety for all purposes.

[0438] However, such enhanced fusogenicity often lowers the viral titer during virus production, thus hampering their clinical applications. To overcome this problem, one aspect of the present disclosure relates to an expression system that limits the expression of the fusogenic protein (the protein with enhanced fusogenicity) and instead favors the expression of a counterpart protein without enhanced fusogenicity during virus production. In some embodiments, limiting the expression of the fusogenic protein (the protein with enhanced fusogenicity) is achieved by inserting a miR-TS cassette into the loci encoding that protein, wherein the miR-TS cassette contains target sequences for one or more miRNAs expressed in the production cells.

[0439] In some embodiments, the counterpart protein without enhanced fusogenicity is expressed by a transgene encoded by the oncolytic virus. In some embodiments, the counterpart protein without enhanced fusogenicity is expressed by a transgene in the production cells that is separated from the viral genome.

[0440] In the case of herpesviruses such as HSV, in some embodiments this strategy can be applied to gB and/or gK proteins comprising one or more mutations which enhances the ability of the HSV to induce syncytium formation upon infecting the target cells (i.e., syncytial mutation(s)). Without wishing to be bound by any particular theory, it is hypothesized that these syncytial mutations in gB and/or gK act by reducing the receptor engagement threshold required to activate the gB/gK fusogenic proteins, such that during virus production most of the viral particles contain gB/gK proteins in an inactive, post-fusogenic conformation, thus lowering the virus yield.

[0441] Accordingly, to improve the yield of the HSV syncytial mutants during virus production (e.g., in Vero cells), an expression system was established to allow co-expression of the non-syncytial version as well as the syncytial mutants of gB and/or gK proteins. In some embodiments, this strategy facilitates the generation of viral envelopes that contain a greater proportion of gB and/or gK proteins in an active conformation.

[0442] In some embodiments, the viral genome of the oncolytic virus of the disclosure encodes a first gB and a second gB, wherein the first gB comprises a syncytial mutation, and wherein the second gB comprises no syncytial mutation. In some embodiments, the first gB is encoded by an endogenous gB gene locus and the second gB is encoded by an exogenous expression cassette. In some embodiments, the first gB is encoded by an exogenous expression cassette and the second gB is encoded by an endogenous gB gene locus. In some embodiments, the exogenous expression cassette is located at the UL50-UL51 intergenic locus. In some embodiments, the exogenous expression cassette is located at the UL3-UL4 intergenic locus.

[0443] In some embodiments, the viral genome of the herpesvirus of the disclosure encodes a first gK and a second gK, wherein the first gK comprises a syncytial mutation, and wherein the second gK comprises no syncytial mutation. In some embodiments, the first gK is encoded by an endogenous gK gene locus and the second gK is encoded by an exogenous expression cassette. In some embodiments, the first gK is encoded by an exogenous expression cassette and the second gK is encoded by an endogenous gK gene locus. In some embodiments, the exogenous expression cassette is located at the UL50-UL51 intergenic locus. In some embodiments, the exogenous expression cassette is located at the UL3-UL4 intergenic locus.

[0444] In some embodiments, the viral genome of the oncolytic virus of the disclosure encodes a first UL20 and a second UL20, wherein the first UL20 comprises a syncytial mutation, and wherein the second UL20 comprises no syncytial mutation. In some embodiments, the first UL20 is encoded by an endogenous UL20 gene locus and the second UL20 is encoded by an exogenous expression cassette. In some embodiments, the first UL20 is encoded by an exogenous expression cassette and the second UL20 is encoded by an endogenous UL20 gene locus. In some embodiments, the exogenous expression cassette is located at the UL50-UL51 intergenic locus. In some embodiments, the exogenous expression cassette is located at the UL3-UL4 intergenic locus.

[0445] In some embodiments, the viral genome of the oncolytic virus of the disclosure encodes a first gH and a second gH, wherein the first gH comprises a syncytial mutation, and wherein the second gH comprises no syncytial mutation. In some embodiments, the first gH is encoded by an endogenous gH gene locus and the second gH is encoded by an exogenous expression cassette. In some embodiments, the first gH is encoded by an exogenous expression cassette and the second gH is encoded by an endogenous gH gene locus. In some embodiments, the exogenous expression cassette is located at the UL50-UL51 intergenic locus. In some embodiments, the exogenous expression cassette is located at the UL3-UL4 intergenic locus.

[0446] In some embodiments, the viral genome of the oncolytic virus of the disclosure encodes a first UL24 and a second UL24, wherein the first UL24 comprises a syncytial mutation, and wherein the second UL24 comprises no syncytial mutation. In some embodiments, the first UL24 is encoded by an endogenous UL24 gene locus and the second UL24 is encoded by an exogenous expression cassette. In some embodiments, the first UL24 is encoded by an exogenous expression cassette and the second UL24 is encoded by an endogenous UL24 gene locus. In some embodiments, the exogenous expression cassette is located at the UL50-UL51 intergenic locus. In some embodiments, the exogenous expression cassette is located at the UL3-UL4 intergenic locus.

[0447] In some embodiments, the oncolytic virus of the disclosure displays enhanced syncytial phenotype in cancer cells.

[0448] In one aspect, the disclosure provides cells comprising a recombinant nucleic acid encoding the oncolytic virus of the disclosure (e.g., a virus encoding a first gB and/or gK comprising one or more syncytial mutations and a second gB and/or gK comprising no syncytial mutation).

[0449] In one aspect, the disclosure provides cells comprising a first nucleic acid encoding the oncolytic virus of the disclosure and a second nucleic acid, wherein the viral genome of the oncolytic virus encodes a first gB comprising one or more syncytial mutations, and wherein the second nucleic acid encodes a second gB comprising no syncytial mutation. In some embodiments, the oncolytic virus of the disclosure (e.g., HSV) comprises a single copy of gB-encoding viral gene and/or a single copy of gK-encoding viral gene.

[0450] In one aspect, the disclosure provides cells comprising a first nucleic acid encoding the oncolytic virus of the disclosure and a second nucleic acid, wherein the viral genome of the oncolytic virus encodes a second gB comprising no syncytial mutation, and wherein the second nucleic acid encodes a first gB comprising one or more syncytial mutations. In some embodiments, the oncolytic virus of the disclosure (e.g., HSV) comprises a single copy of gB-encoding viral gene and/or a single copy of gK-encoding viral gene.

[0451] In one aspect, the disclosure provides cells comprising a first nucleic acid encoding the oncolytic virus of the disclosure and a second nucleic acid, wherein the viral genome of the oncolytic virus of the disclosure encodes a first gK comprising one or more syncytial mutations, and wherein the second nucleic acid encodes a second gK comprising no syncytial mutation. In some embodiments, the oncolytic virus of the disclosure (e.g., HSV) comprises a single copy of gB-encoding viral gene and/or a single copy of gK-encoding viral gene.

[0452] In one aspect, the disclosure provides cells comprising a first nucleic acid encoding the oncolytic virus of the disclosure and a second nucleic acid, wherein the viral genome of the oncolytic virus of the disclosure encodes a second gK comprising no syncytial mutation, and wherein the second nucleic acid encodes a first gK comprising one or more syncytial mutations. In some embodiments, the oncolytic virus of the disclosure (e.g., HSV) comprises a single copy of gB-encoding viral gene and/or a single copy of gK-encoding viral gene.

[0453] In one aspect, the disclosure provides cells comprising a first nucleic acid encoding the oncolytic virus of the disclosure and a second nucleic acid, wherein the viral genome of the oncolytic virus encodes a first gH comprising one or more syncytial mutations, and wherein the second nucleic acid encodes a second gH comprising no syncytial mutation.

[0454] In one aspect, the disclosure provides cells comprising a first nucleic acid encoding the oncolytic virus of the disclosure and a second nucleic acid, wherein the viral genome of the oncolytic virus encodes a second gH comprising no syncytial mutation, and wherein the second nucleic acid encodes a first gH comprising one or more syncytial mutations.

[0455] In one aspect, the disclosure provides cells comprising a first nucleic acid encoding the oncolytic virus of the disclosure and a second nucleic acid, wherein the viral genome of the oncolytic virus encodes a first UL20 comprising one or more syncytial mutations, and wherein the second nucleic acid encodes a second UL20 comprising no syncytial mutation.

[0456] In one aspect, the disclosure provides cells comprising a first nucleic acid encoding the oncolytic virus of the disclosure and a second nucleic acid, wherein the viral genome of the oncolytic virus encodes a second UL20 comprising no syncytial mutation, and wherein the second nucleic acid encodes a first UL20 comprising one or more syncytial mutations.

[0457] In one aspect, the disclosure provides cells comprising a first nucleic acid encoding the oncolytic virus of the disclosure and a second nucleic acid, wherein the viral genome of the oncolytic virus encodes a first UL24 comprising one or more syncytial mutations, and wherein the second nucleic acid encodes a second UL24 comprising no syncytial mutation.

[0458] In one aspect, the disclosure provides cells comprising a first nucleic acid encoding the oncolytic virus of the disclosure and a second nucleic acid, wherein the viral genome of the oncolytic virus encodes a second UL24 comprising no syncytial mutation, and wherein the second nucleic acid encodes a first UL24 comprising one or more syncytial mutations.

[0459] In some embodiments, the first nucleic acid and the second nucleic acid are comprised within a single polynucleotide molecule in the cells. In some embodiments, the first nucleic acid and the second nucleic acid are comprised within two different polynucleotide molecules in the cells.

[0460] In some embodiments, the cells are Vero cells. In some embodiments, the cells are for production of the oncolytic virus in vitro.

[0461] In some embodiments, the gB syncytial mutation comprises a mutation at one or more amino acid residues corresponding to R796, R800, T813, L817, S854, A855, R858, or A874, an insertion between E816 and L817, a deletion of S869 to C-terminus, a deletion of T877 to C-terminus, or a combination thereof, of SEQ ID NO: 919. In some embodiments, the gB syncytial mutation comprises one or more mutations corresponding to R796C, R800W, T813I, L817H, L817P, S854F, A855V, R858C, R858H, A874P, an insertion of VN or VNVN between E816 and L817, a deletion of S869 to C-terminus, or a deletion of T877 to C-terminus, of SEQ ID NO: 919. In some embodiments, the gB syncytial mutation comprises a mutation corresponding to R796C, R800W, T813I, L817H, L817P, S854F, A855V, R858C, R858H, A874P, an insertion of VN or VNVN between E816 and L817, a deletion of S869 to C-terminus, or a deletion of T877 to C-terminus, of SEQ ID NO: 919. In some embodiments, the gB syncytial mutation comprises a mutation at the amino acid residue corresponding to R796 of SEQ ID NO: 919. In some embodiments, the gB syncytial mutation comprises a mutation corresponding to R796C of SEQ ID NO: 919. In some embodiments, the gB syncytial mutation comprises a mutation at the amino acid residue corresponding to R800 of SEQ ID NO: 919. In some embodiments, the gB syncytial mutation comprises a mutation corresponding to R800W of SEQ ID NO: 919. In some embodiments, the gB syncytial mutation comprises a mutation at the amino acid residue corresponding to T813 of SEQ ID NO: 919. In some embodiments, the gB syncytial mutation comprises a mutation corresponding to T813I of SEQ ID NO: 919. In some embodiments, the gB syncytial mutation comprises a mutation at the amino acid residue corresponding to L817 of SEQ ID NO: 919. In some embodiments, the gB syncytial mutation comprises a mutation corresponding to L817H of SEQ ID NO: 919. In some embodiments, the gB syncytial mutation comprises a mutation corresponding to L817P of SEQ ID NO: 919. In some embodiments, the gB syncytial mutation comprises a mutation at the amino acid residue corresponding to S854 of SEQ ID NO: 919. In some embodiments, the gB syncytial mutation comprises a mutation corresponding to S854F of SEQ ID NO: 919. In some embodiments, the gB syncytial mutation comprises a mutation at the amino acid residue corresponding to A855 of SEQ ID NO: 919. In some embodiments, the gB syncytial mutation comprises a mutation corresponding to A855V of SEQ ID NO: 919. In some embodiments, the gB syncytial mutation comprises a mutation at the amino acid residue corresponding to R858 of SEQ ID NO: 919. In some embodiments, the gB syncytial mutation comprises a mutation corresponding to R858C of SEQ ID NO: 919. In some embodiments, the gB syncytial mutation comprises a mutation corresponding to R858H of SEQ ID NO: 919. In some embodiments, the gB syncytial mutation comprises a mutation at the amino acid residue corresponding to A874 of SEQ ID NO: 919. In some embodiments, the gB syncytial mutation comprises a mutation corresponding to A874P of SEQ ID NO: 919. In some embodiments, the gB syncytial mutation comprises an insertion between amino acid residues corresponding to E816 and L817 of SEQ ID NO: 919. In some embodiments, the gB syncytial mutation comprises a mutation corresponding to an insertion of VN between E816 and L817 of SEQ ID NO: 919. In some embodiments, the gB syncytial mutation comprises a mutation corresponding to an insertion of VNVN between E816 and L817 of SEQ ID NO: 919. In some embodiments, the gB syncytial mutation comprises a deletion of the amino acid residues corresponding to S869 to C-terminus of SEQ ID NO: 919. In some embodiments, the gB syncytial mutation comprises a deletion of the amino acid residues corresponding to T877 to C-terminus of SEQ ID NO: 919.

[0462] In some embodiments, the first and the second gB further comprise a mutation corresponding to D285N and/or A549T of SEQ ID NO: 919. In some embodiments, the first gB, but not the second gB, further comprises a mutation corresponding to D285N and/or A549T of SEQ ID NO: 919. In some embodiments, the second gB, but not the first gB, further comprises a mutation corresponding to D285N and/or A549T of SEQ ID NO: 919.

[0463] In some embodiments, the open reading frame encoding the first gB is operably linked to a CMV promoter. In some embodiments, the open reading frame encoding the first gB is operably linked to a bGH polyA tail.

[0464] In some embodiments, the open reading frame encoding the second gB is operably linked to a CMV promoter. In some embodiments, the open reading frame encoding the second gB is operably linked to a bGH poly A tail.

[0465] In some embodiments, the gK syncytial mutation comprises a mutation at one or more amino acid residues corresponding to P33, A40, L86, D99, A111, L118, T121, C243, L304, 1307, or R310 of SEQ ID NO: 920. In some embodiments, the gK syncytial mutation comprises one or more mutations corresponding to P33S, A40V, A40T, L86P, D99N, A111V, L118Q, T121I, C243Y, L304P, 1307N, or R310L of SEQ ID NO: 920. In some embodiments, the gK syncytial mutation comprises a mutation at the amino acid residue corresponding to P33 of SEQ ID NO: 920. In some embodiments, the gK syncytial mutation comprises a mutation corresponding to P33S of SEQ ID NO: 920. In some embodiments, the gK syncytial mutation comprises a mutation at the amino acid residue corresponding to A40 of SEQ ID NO: 920. In some embodiments, the gK syncytial mutation comprises a mutation corresponding to A40V of SEQ ID NO: 920. In some embodiments, the gK syncytial mutation comprises a mutation corresponding to A40T of SEQ ID NO: 920. In some embodiments, the gK syncytial mutation comprises a mutation at the amino acid residue corresponding to L86 of SEQ ID NO: 920. In some embodiments, the gK syncytial mutation comprises a mutation corresponding to L86P of SEQ ID NO: 920. In some embodiments, the gK syncytial mutation comprises a mutation at the amino acid residue corresponding to D99 of SEQ ID NO: 920. In some embodiments, the gK syncytial mutation comprises a mutation corresponding to D99N of SEQ ID NO: 920. In some embodiments, the gK syncytial mutation comprises a mutation at the amino acid residue corresponding to A111 of SEQ ID NO: 920. In some embodiments, the gK syncytial mutation comprises a mutation corresponding to A111V of SEQ ID NO: 920. In some embodiments, the gK syncytial mutation comprises a mutation at the amino acid residue corresponding to L118 of SEQ ID NO: 920. In some embodiments, the gK syncytial mutation comprises a mutation corresponding to L118Q of SEQ ID NO: 920. In some embodiments, the gK syncytial mutation comprises a mutation at the amino acid residue corresponding to T121 of SEQ ID NO: 920. In some embodiments, the gK syncytial mutation comprises a mutation corresponding to T121I of SEQ ID NO: 920. In some embodiments, the gK syncytial mutation comprises a mutation at the amino acid residue corresponding to C243 of SEQ ID NO: 920. In some embodiments, the gK syncytial mutation comprises a mutation corresponding to C243Y of SEQ ID NO: 920. In some embodiments, the gK syncytial mutation comprises a mutation at the amino acid residue corresponding to L304 of SEQ ID NO: 920. In some embodiments, the gK syncytial mutation comprises a mutation corresponding to L304P of SEQ ID NO: 920. In some embodiments, the gK syncytial mutation comprises a mutation at the amino acid residue corresponding to 1307 of SEQ ID NO: 920. In some embodiments, the gK syncytial mutation comprises a mutation corresponding to 1307N of SEQ ID NO: 920. In some embodiments, the gK syncytial mutation comprises a mutation at the amino acid residue corresponding to R310 of SEQ ID NO: 920. In some embodiments, the gK syncytial mutation comprises a mutation corresponding to R310L of SEQ ID NO: 920.

[0466] In some embodiments, the open reading frame encoding the first gK is operably linked to a CMV promoter. In some embodiments, the open reading frame encoding the first gK is operably linked to a bGH poly A tail.

[0467] In some embodiments, the open reading frame encoding the second gK is operably linked to a CMV promoter. In some embodiments, the open reading frame encoding the second gK is operably linked to a bGH poly A tail.

[0468] In some embodiments, the gH syncytial mutation comprises a mutation at one or more amino acid residues corresponding to N753 or A778 of SEQ ID NO: 943. In some embodiments, the gH syncytial mutation comprises one or more mutations corresponding to N753K or A778V of SEQ ID NO: 943. In some embodiments, the gH syncytial mutation comprises mutations corresponding to N753K and A778V of SEQ ID NO: 943. Additional description of the gH mutation can be found, for example, at Uchida et al., J Virol. 2013 February; 87 (3): 1430-1442, the content of which is incorporated by reference in its entirety for all purposes.

[0469] In some embodiments, the UL20 syncytial mutation comprises a mutation at one or more amino acid residues corresponding to Y49A, S50A, R51A, R209A, T212A, R213A, or c-terminal deletion after N217, of SEQ ID NO: 944. In some embodiments, the UL20 syncytial mutation comprises one or more mutations corresponding to Y49A, S50A, R51A, R209A, T212A, R213A, or c-terminal deletion after N217, of SEQ ID NO: 944. In some embodiments, the UL20 syncytial mutation comprises the mutations corresponding to Y49A, S50A, and R51A of SEQ ID NO: 944. In some embodiments, the UL20 syncytial mutation comprises the mutations corresponding to R209A, T212A, and R213A of SEQ ID NO: 944.

[0470] In some embodiments, the UL24 syncytial mutation comprises a mutation at one or more amino acid residues corresponding to T64, R63, or V64 of SEQ ID NO: 942. In some embodiments, the UL24 syncytial mutation comprises one or more mutations corresponding to T64G, R63V, or V64S of SEQ ID NO: 942. In some embodiments, the UL24 syncytial mutation comprises the mutations corresponding to T64G, R63V and V64S of SEQ ID NO: 942.

[0471] This strategy can be extrapolated to other viruses as well. In general, when a syncytial mutation is introduced into a protein encoded by a recombinant virus, so that the recombinant virus has enhanced fusogenicity, the production yield of the recombinant virus in the production cell may be improved by co-expressing a counterpart protein without the syncytial mutation (encoded by the virus or the production cell). Either protein may be encoded by an endogenous viral gene or by an exogenous expression cassette.

[0472] In some embodiments, the yield of the recombinant oncolytic virus for the virus or cells comprising the second nucleic acid encoding the counterpart protein without enhanced fusogenicity (e.g., the second gB and/or gK, which comprises no syncytial mutation) is increased by at least 1-fold, at least 2-fold, at least 3-fold, at least 5-fold, at least 8-fold, at least 10-fold, at least 20-fold, at least 50-fold, at least 100-fold, at least 200-fold, at least 500-fold, or at least 1000-fold compared to the yield of a control oncolytic virus or control cells that does not encode the counterpart protein without the enhanced fusogenicity. In some embodiments, the yield of the recombinant oncolytic virus is increased by at least 1-fold. In some embodiments, the yield of the recombinant oncolytic virus is increased by at least 2-fold. In some embodiments, the yield of the recombinant oncolytic virus is increased by at least 3-fold. In some embodiments, the yield of the recombinant oncolytic virus is increased by at least 5-fold. In some embodiments, the yield of the recombinant oncolytic virus is increased by at least 8-fold. In some embodiments, the yield of the recombinant oncolytic virus is increased by at least 10-fold. In some embodiments, the yield of the recombinant oncolytic virus is increased by at least 20-fold. In some embodiments, the yield of the recombinant oncolytic virus is increased by at least 50-fold. In some embodiments, the yield of the recombinant oncolytic virus is increased by at least 100-fold. In some embodiments, the yield of the recombinant oncolytic virus is increased by at least 200-fold. In some embodiments, the yield of the recombinant oncolytic virus is increased by at least 500-fold. In some embodiments, the yield of the recombinant oncolytic virus is increased by at least 1000-fold.

[0473] In some embodiments, in the oncolytic virus of the disclosure, the gene encoding the fusogenic protein (the protein with enhanced fusogenicity) comprises a miRNA target sequence (miR-TS) cassette, wherein the miR-TS cassette comprises one or more target sequences of one or more miRNAs. In some embodiments, the one or more miRNAs are highly expressed in the cells for virus production in vitro. In some embodiments, the one or more miRNAs have no or minimal expression in the target cells (e.g., cancer cells). In some embodiments, the one or more miRNAs have relatively higher expression in the cells for virus production in vitro compared to the target cells (e.g., cancer cells). In some embodiments, the cells for virus production in vitro express the one or more miRNAs at a level that is at least 1-fold, at least 2-fold, at least 3-fold, at least 5-fold, at least 8-fold, at least 10-fold, at least 20-fold, at least 50-fold, at least 100-fold, at least 200-fold, at least 500-fold, or at least 1000-fold higher than that of the target cells (e.g., cancer cells).

[0474] In some embodiments, the gene encoding the first gB comprises a miRNA target sequence (miR-TS) cassette, wherein the miR-TS cassette comprises one or more target sequences of one or more miRNAs. In some embodiments, the one or more miRNAs are highly expressed in the cells for virus production in vitro. In some embodiments, the one or more miRNAs have no or minimal expression in the target cells (e.g., cancer cells). In some embodiments, the one or more miRNAs have relatively higher expression in the cells for virus production in vitro compared to the target cells (e.g., cancer cells). In some embodiments, the cells for virus production in vitro express the one or more miRNAs at a level that is at least 1-fold, at least 2-fold, at least 3-fold, at least 5-fold, at least 8-fold, at least 10-fold, at least 20-fold, at least 50-fold, at least 100-fold, at least 200-fold, at least 500-fold, or at least 1000-fold higher than that of the target cells (e.g., cancer cells).

[0475] In some embodiments, the gene encoding the first gK comprises a miRNA target sequence (miR-TS) cassette, wherein the miR-TS cassette comprises one or more target sequences of one or more miRNAs. In some embodiments, the one or more miRNAs are highly expressed in the cells for virus production in vitro. In some embodiments, the one or more miRNAs have no or minimal expression in the target cells (e.g., cancer cells). In some embodiments, the one or more miRNAs have relatively higher expression in the cells for virus production in vitro compared to the target cells (e.g., cancer cells). In some embodiments, the cells for virus production in vitro express the one or more miRNAs at a level that is at least 1-fold, at least 2-fold, at least 3-fold, at least 5-fold, at least 8-fold, at least 10-fold, at least 20-fold, at least 50-fold, at least 100-fold, at least 200-fold, at least 500-fold, or at least 1000-fold higher than that of the target cells (e.g., cancer cells).

[0476] In some embodiments, the one or more miRNAs comprise at least one of miR-34c-5p, miR-299-5p, and miR-582-5p. In some embodiments, the one or more miRNAs comprise miR-34c-5p. In some embodiments, the one or more miRNAs comprise miR-299-5p. In some embodiments, the one or more miRNAs comprise miR-582-5p. In some embodiments, the one or more miRNAs comprise at least two of miR-34c-5p, miR-299-5p, and miR-582-5p. In some embodiments, the one or more miRNAs comprise miR-34c-5p and miR-299-5p. In some embodiments, the one or more miRNAs comprise miR-299-5p and miR-582-5p. In some embodiments, the one or more miRNAs comprise miR-34c-5p and miR-582-5p. In some embodiments, the one or more miRNAs comprise miR-34c-5p, miR-299-5p, and miR-582-5p. In some embodiments, the miRNA target sequence comprises or consists of the reverse complement of the miRNA. In some embodiments, the miR-34c-5p target sequences are at most 4, at most 3, at most 2, or at most 1 nucleotide(s) different from SEQ ID NO: 927. In some embodiments, the miR-34c-5p target sequences comprise or consist of SEQ ID NO: 927. In some embodiments, the miR-299-5p target sequences are at most 4, at most 3, at most 2, or at most 1 nucleotide(s) different from SEQ ID NO: 928. In some embodiments, the miR-299-5p target sequences comprise or consist of SEQ ID NO: 928. In some embodiments, the miR-582-5p target sequences are at most 4, at most 3, at most 2, or at most 1 nucleotide(s) different from SEQ ID NO: 929. In some embodiments, the miR-582-5p target sequences comprise or consist of SEQ ID NO: 929. In some embodiments, the miR-TS cassette comprises at least three copies, or at least four copies of the target sequences of each of the miRNA separated by a 4 bp spacer. In some embodiments, the miR-TS cassette is located at the 3′UTR of the gene(s) (e.g., the gene(s) encoding gB and/or gK). In some embodiments, the target sequence of the miRNA comprises or consists of the reverse complement of the miRNA. In some embodiments, the miR-TS cassette comprises at least 1, 2, 3, or 4 copies of a target sequence for miR-34c-5p.

[0477] In some embodiments, the miR-TS cassette comprises at least 1, 2, 3, or 4 copies of a target sequence for miR-299-5p. In some embodiments, the miR-TS cassette comprises at least 1, 2, 3, or 4 copies of a target sequence for miR-582-5p. In some embodiments, the miRNA target sequences in the miR-TS cassettes are arranged as follows:
[0478] (299-5p)-(34c-5p)-(582-5p)-(34c-5p)-(299-5p)-(582-5p)-(299-5p)-(582-5p)-(34c-5p)-(299-5p)-(582-5p)-(34c-5p).

[0479] In some embodiments, the miR-TS cassette comprises a polynucleotide sequence at least 80%, at least 85%, at least 90%, at least 95%, at least 96%, at least 97%, at least 98%, at least 99%, or 100% identical to SEQ ID NO: 930. In some embodiments, the miR-TS cassette comprises the polynucleotide sequence of SEQ ID NO: 930.

[0480] In one aspect, the disclosure provides fusogenic oncolytic viruses (e.g., HSV) produced by culturing the cells of the disclosure and recovering the fusogenic oncolytic virus (e.g., HSV) from the cell culture.

[0481] In one aspect, the disclosure a fusogenic oncolytic viruses (e.g., HSV) wherein the viral genome of the virus encodes a gK comprising a syncytial mutation corresponding to 1307N of SEQ ID NO: 920. In some embodiments, the gK comprises an amino acid sequence at least 90%, at least 95%, at least 96%, at least 97%, at least 98%, at least 99%, or 100% identical to SEQ ID NO: 920, except the syncytial mutation corresponding to 1307N of SEQ ID NO: 920.

[0482] In some embodiments, the presence of the miR-TS cassette decreases the expression of the fusogenic protein (e.g., the first gB or the first gK, which comprises the syncytial mutation) by at least 1-fold, at least 2-fold, at least 3-fold, at least 5-fold, at least 8-fold, at least 10-fold, at least 20-fold, at least 50-fold, at least 100-fold, at least 200-fold, at least 500-fold, or at least 1000-fold in the cells for virus production, compared to the expression of a control fusogenic protein encoding gene that does not comprise the miR-TS cassette. In some embodiments, the expression of the fusogenic protein is decreased by at least 1-fold. In some embodiments, the expression of the fusogenic protein is decreased by at least 2-fold. In some embodiments, the expression of the fusogenic protein is decreased by at least 3-fold. In some embodiments, the expression of the fusogenic protein is decreased by at least 5-fold. In some embodiments, the expression of the fusogenic protein is decreased by at least 8-fold. In some embodiments, the expression of the fusogenic protein is decreased by at least 10-fold. In some embodiments, the expression of the fusogenic protein is decreased by at least 20-fold. In some embodiments, the expression of the fusogenic protein is decreased by at least 50-fold. In some embodiments, the expression of the fusogenic protein is decreased by at least 100-fold. In some embodiments, the expression of the fusogenic protein is decreased by at least 200-fold. In some embodiments, the expression of the fusogenic protein is decreased by at least 500-fold. In some embodiments, the expression of the fusogenic protein is decreased by at least 1000-fold.

[0483] In some embodiments, the yield of the recombinant oncolytic virus for the virus or the cells comprising the miR-TS cassette in the gene encoding the fusogenic protein (e.g., the first gB or the first gK, which comprises the syncytial mutation) is increased by at least 1-fold, at least 2-fold, at least 3-fold, at least 5-fold, at least 8-fold, at least 10-fold, at least 20-fold, at least 50-fold, at least 100-fold, at least 200-fold, at least 500-fold, or at least 1000-fold compared to the yield of a control oncolytic virus or control cells that does not comprise the miR-TS cassette. In some embodiments, the yield of the recombinant oncolytic virus is increased by at least 1-fold. In some embodiments, the yield of the recombinant oncolytic virus is increased by at least 2-fold. In some embodiments, the yield of the recombinant oncolytic virus is increased by at least 3-fold. In some embodiments, the yield of the recombinant oncolytic virus is increased by at least 5-fold. In some embodiments, the yield of the recombinant oncolytic virus is increased by at least 8-fold. In some embodiments, the yield of the recombinant oncolytic virus is increased by at least 10-fold. In some embodiments, the yield of the recombinant oncolytic virus is increased by at least 20-fold. In some embodiments, the yield of the recombinant oncolytic virus is increased by at least 50-fold. In some embodiments, the yield of the recombinant oncolytic virus is increased by at least 100-fold. In some embodiments, the yield of the recombinant oncolytic virus is increased by at least 200-fold. In some embodiments, the yield of the recombinant oncolytic virus is increased by at least 500-fold. In some embodiments, the yield of the recombinant oncolytic virus is increased by at least 1000-fold.

### Particles and Nucleic Acids

[0484] In one aspect, the disclosure provides nucleic acid molecules encoding the virus of the disclosure. In some embodiments, the nucleic acid molecule is DNA. In some embodiments, the nucleic acid molecule is RNA. In some embodiments, the type of the nucleic acid molecule (DNA/RNA) is the same as the type of the virus (DNA virus/RNA virus).

[0485] In some embodiments, the nucleic acid molecule of the disclosure is comprised within particles. In some embodiments, the particle is a non-viral particle (e.g., LNP). In some embodiments, the particle is a non-tissue derived composition of matter such as liposomes, lipoplexes, nanoparticles, nanocapsules, microparticles, microspheres, lipid particles, exosomes, vesicles, and the like. In some embodiments, the particles are non-proteinaceous and non-immunogenic. In some embodiments, the particles are inorganic particles. In some embodiments, the inorganic particles are gold nanoparticles (GNP), gold nanorods (GNR), magnetic nanoparticles (MNP), magnetic nanotubes (MNT), carbon nanohorns (CNH), carbon fullerenes, carbon nanotubes (CNT), calcium phosphate nanoparticles (CPNP), mesoporous silica nanoparticles (MSN), silica nanotubes (SNT), or a starlike hollow silica nanoparticle (SHNP).

[0486] In some embodiments, encapsulation of the nucleic acid molecules of the disclosure allows for delivery of a viral genome without the induction of a systemic, anti-viral immune response and mitigates the effects of neutralizing anti-viral antibodies. Further, encapsulation of the nucleic acid molecules of the disclosure shields the genomes from degradation and facilitates the introduction into target host cells. In some embodiments, the particles are nanoparticles. In some embodiments, the particles are lipid nanoparticles. In some embodiments, the particles are exosomes. In some embodiments, the particle comprises no additional nucleic acid molecule. In some embodiments, the particles comprises no viral protein.

[0487] In some embodiments, the particles of the disclosure are nanoscopic in size, in order to enhance solubility, avoid possible complications caused by aggregation in vivo and to facilitate pinocytosis. In some embodiments, the particle has an average diameter of about less than about 1000 nm. In some embodiments, the particle has an average diameter of less than about 500 nm. In some embodiments, the particle has an average diameter of between about 30 and about 100 nm, between about 50 and about 100 nm, or between about 75 and about 100 nm. In some embodiments, the particle has an average diameter of between about 30 and about 75 nm or between about 30 and about 50 nm. In some embodiments, the particle has an average diameter between about 100 and about 500 nm. In some embodiments, the particle has an average diameter between about 200 and 400 nm. In some embodiments, the particle has an average size of about 350 nm.

[0488] In some embodiments, the particles are lipid nanoparticles (LNPs). In some embodiments, the LNP comprises one or more lipids such as such as triglycerides (e.g., tristearin), diglycerides (e.g., glycerol bahenate), monoglycerides (e.g., glycerol monostearate), fatty acids (e.g., stearic acid), steroids (e.g., cholesterol), and waxes (e.g., cetyl palmitate). In some embodiments, the LNP comprises one or more cationic lipids and one or more helper lipids. In some embodiments, the LNP comprises one or more cationic lipids, a cholesterol, and one or more neutral lipids.

### Compositions and Methods of Use

[0489] Certain aspects of the disclosure relate to stocks and compositions comprising the oncolytic viruses described herein. In some aspects, the disclosure relates to a viral stock comprising an oncolytic virus described herein. In some embodiments, a viral stock is a homogeneous stock. The preparation and analysis of viral stocks is well known in the art. For example, a viral stock can be manufactured in roller bottles containing cells transduced with the viral vector. The viral stock can then be purified on a continuous nycodenze gradient, and aliquotted and stored until needed. Viral stocks vary considerably in titer, depending largely on viral genotype and the protocol and cell lines used to prepare them.

[0490] In particular embodiments, the titer of a viral stock (e.g., an HSV-based vector viral stock) contemplated herein is at least about 10⁵ plaque-forming units (pfu), such as at least about 10⁶ pfu or even more preferably at least about 10⁷ pfu. In certain embodiments, the titer can be at least about 10⁸ pfu, or at least about 10⁹ pfu, and high titer stocks of at least about 10¹⁰ pfu or at least about 10¹¹ pfu are most preferred.

[0491] The disclosure further contemplates a composition comprising an oncolytic virus or a nucleic acid molecule described herein and a pharmaceutically acceptable carrier. The phrase “pharmaceutically-acceptable” refers to molecular entities and compositions that do not produce an allergic or similar untoward reaction when administered to a subject (e.g., a human). The term “composition” as used herein refers to a formulation of one or more oncolytic virus or a nucleic acid molecules described herein that is capable of being administered or delivered to a subject and/or a cell. Typically, formulations include all physiologically acceptable compositions including derivatives and/or prodrugs, solvates, stereoisomers, racemates, or tautomers thereof with any physiologically acceptable carriers, diluents, and/or excipients. A “therapeutic composition” or “pharmaceutical composition” (used interchangeably herein) is a composition of one or more agents capable of being administered or delivered to a patient and/or subject and/or cell for the treatment of a particular disease or disorder.

[0492] The compositions disclosed herein may be formulated in a neutral or salt form. “Pharmaceutically acceptable salt” includes both acid and base addition salts. Pharmaceutically-acceptable salts include the acid addition salts (formed with the free amino groups of the protein) and which are formed with inorganic acids such as, for example, hydrochloric acid, hydrobromic acid, sulfuric acid, nitric acid, phosphoric acid and the like, and organic acids such as, but not limited to, acetic acid, 2,2-dichloroacetic acid, adipic acid, alginic acid, ascorbic acid, aspartic acid, benzenesulfonic acid, benzoic acid, 4-acetamidobenzoic acid, camphoric acid, camphor-10-sulfonic acid, capric acid, caproic acid, caprylic acid, carbonic acid, cinnamic acid, citric acid, cyclamic acid, dodecylsulfuric acid, ethane-1,2-disulfonic acid, ethanesulfonic acid, 2-hydroxyethanesulfonic acid, formic acid, fumaric acid, galactaric acid, gentisic acid, glucoheptonic acid, gluconic acid, glucuronic acid, glutamic acid, glutaric acid, 2-oxo-glutaric acid, glycerophosphoric acid, glycolic acid, hippuric acid, isobutyric acid, lactic acid, lactobionic acid, lauric acid, maleic acid, malic acid, malonic acid, mandelic acid, methanesulfonic acid, mucic acid, naphthalene-1,5-disulfonic acid, naphthalene-2-sulfonic acid, 1-hydroxy-2-naphthoic acid, nicotinic acid, oleic acid, orotic acid, oxalic acid, palmitic acid, pamoic acid, propionic acid, pyroglutamic acid, pyruvic acid, salicylic acid, 4-aminosalicylic acid, sebacic acid, stearic acid, succinic acid, tartaric acid, thiocyanic acid, ptoluenesulfonic acid, trifluoroacetic acid, undecylenic acid, and the like. Salts formed with the free carboxyl groups can also be derived from inorganic bases such as, for example, sodium, potassium, lithium, ammonium, calcium, magnesium, iron, zinc, copper, manganese, aluminum salts and the like. Salts derived from organic bases include, but are not limited to, salts of primary, secondary, and tertiary amines, substituted amines including naturally occurring substituted amines, cyclic amines and basic ion exchange resins, such as ammonia, isopropylamine, trimethylamine, diethylamine, triethylamine, tripropylamine, diethanolamine, ethanolamine, deanol, 2-dimethylaminoethanol, 2-diethylaminoethanol, dicyclohexylamine, lysine, arginine, histidine, caffeine, procaine, hydrabamine, choline, betaine, benethamine, benzathine, ethylenediamine, glucosamine, methylglucamine, theobromine, triethanolamine, tromethamine, purines, piperazine, piperidine, N-ethylpiperidine, polyamine resins and the like. Particularly preferred organic bases are isopropylamine, diethylamine, ethanolamine, trimethylamine, dicyclohexylamine, choline and caffeine. Upon formulation, solutions will be administered in a manner compatible with the dosage formulation and in such amount as is therapeutically effective. The formulations are easily administered in a variety of dosage forms such as injectable solutions, drug-release capsules, and the like.

[0493] As used herein, “carrier” includes any and all solvents, dispersion media, vehicles, coatings, diluents, antibacterial and antifungal agents, isotonic and absorption delaying agents, buffers, carrier solutions, suspensions, colloids, and the like. The use of such media and agents for pharmaceutical active substances is well known in the art. Except insofar as any conventional media or agent is incompatible with the active ingredient, its use in the therapeutic compositions is contemplated. Supplementary active ingredients can also be incorporated into the compositions.

[0494] As used herein “pharmaceutically acceptable carrier” includes without limitation any adjuvant, carrier, excipient, glidant, sweetening agent, diluent, preservative, dye/colorant, flavor enhancer, surfactant, wetting agent, dispersing agent, suspending agent, stabilizer, isotonic agent, solvent, surfactant, dispersion media, coatings, antibacterial and antifungal agents, isotonic and absorption delaying agents, and the like that are physiologically compatible, including pharmaceutically acceptable cell culture media and/or emulsifier which has been approved by the United States Food and Drug Administration as being acceptable for use in humans and/or domestic animals. Exemplary pharmaceutically acceptable carriers include, but are not limited to, to sugars, such as lactose, glucose and sucrose; starches, such as corn starch and potato starch; cellulose, and its derivatives, such as sodium carboxymethyl cellulose, ethyl cellulose and cellulose acetate; tragacanth; malt; gelatin; talc; cocoa butter, waxes, animal and vegetable fats, paraffins, silicones, bentonites, silicic acid, zinc oxide; oils, such as peanut oil, cottonseed oil, safflower oil, sesame oil, olive oil, corn oil and soybean oil; glycols, such as propylene glycol; polyols, such as glycerin, sorbitol, mannitol and polyethylene glycol; esters, such as ethyl oleate and ethyl laurate; agar; buffering agents, such as magnesium hydroxide and aluminum hydroxide; alginic acid; pyrogen-free water; isotonic saline; Ringer's solution; ethyl alcohol; phosphate buffer solutions; and any other compatible substances employed in pharmaceutical formulations. Except insofar as any conventional media and/or agent is incompatible with the agents of the present disclosure, its use in therapeutic compositions is contemplated. Supplementary active ingredients also can be incorporated into the compositions.

[0495] Wetting agents, emulsifiers and lubricants, such as sodium lauryl sulfate and magnesium stearate, as well as coloring agents, release agents, coating agents, sweetening, flavoring and perfuming agents, preservatives and antioxidants can also be present in the compositions.

[0496] Examples of pharmaceutically-acceptable antioxidants include: (1) water soluble antioxidants, such as ascorbic acid, cysteine hydrochloride, sodium bisulfate, sodium metabisulfite, sodium sulfite and the like; (2) oil-soluble antioxidants, such as ascorbyl palmitate, butylated hydroxyanisole (BHA), butylated hydroxytoluene (BHT), lecithin, propyl gallate, alpha-tocopherol, and the like; and (3) metal chelating agents, such as citric acid, ethylenediamine tetraacetic acid (EDTA), sorbitol, tartaric acid, phosphoric acid, and the like.

[0497] In one embodiment, a composition comprising a carrier is suitable for parenteral administration, e.g., intravascular (intravenous or intraarterial), intraperitoneal or intramuscular administration. Pharmaceutically acceptable carriers include sterile aqueous solutions or dispersions and sterile powders for the extemporaneous preparation of sterile injectable solutions or dispersion. The use of such media and agents for pharmaceutically active substances is well known in the art. Except insofar as any conventional media or agent is incompatible with a viral vector or nucleic acid molecule, use thereof in the pharmaceutical compositions of the disclosure is contemplated.

[0498] The compositions of the disclosure may comprise one or more polypeptides, polynucleotides, vectors comprising same, infected cells, etc., as described herein, formulated in pharmaceutically-acceptable or physiologically-acceptable solutions for administration to a cell or an animal, either alone, or in combination with one or more other modalities of therapy. It will also be understood that, if desired, the compositions of the disclosure may be administered in combination with other agents as well, such as, e.g., cytokines, growth factors, hormones, small molecules or various pharmaceutically-active agents. There is virtually no limit to other components that may also be included in the compositions, provided that the additional agents do not adversely affect the ability of the composition to deliver the intended therapy.

[0499] In the pharmaceutical compositions of the disclosure, formulation of pharmaceutically-acceptable excipients and carrier solutions is well-known to those of skill in the art, as is the development of suitable dosing and treatment regimens for using the particular compositions described herein in a variety of treatment regimens. Upon formulation, solutions are administered in a manner compatible with the dosage formulation and in such amount as is therapeutically effective to result in an improvement or remediation of the symptoms. The formulations are easily administered in a variety of dosage forms such as ingestible solutions, drug release capsules and the like. Some variation in dosage can occur depending on the condition of the subject being treated. The person responsible for administration can, in any event, determine the appropriate dose for the individual subject. Moreover, for human administration, preparations meet sterility, general safety and purity standards as required by FDA Center for Biologics Evaluation and Research standards. The route of administration will vary, naturally, with the location and nature of the disease being treated, and may include, for example intradermal, transdermal, subdermal, parenteral, nasal, intravenous, intramuscular, intranasal, subcutaneous, percutaneous, intratracheal, intraperitoneal, intratumoral, perfusion, lavage, direct injection, and oral administration.

[0500] In certain circumstances it will be desirable to deliver the compositions, recombinant viral vectors, and nucleic acid molecules disclosed herein parenterally, intravenously, intramuscularly, or even intraperitoneally as described, for example, in U.S. Pat. Nos. 5,543,158; 5,641,515 and 5,399,363 (each specifically incorporated herein by reference in its entirety). Solutions of the active compounds as free base or pharmacologically acceptable salts may be prepared in water suitably mixed with a surfactant, such as hydroxypropylcellulose. Dispersions may also be prepared in glycerol, liquid polyethylene glycols, and mixtures thereof and in oils. Under ordinary conditions of storage and use, these preparations contain a preservative to prevent the growth of microorganisms.

[0501] The pharmaceutical forms suitable for injectable use include sterile aqueous solutions or dispersions and sterile powders for the extemporaneous preparation of sterile injectable solutions or dispersions (U.S. Pat. No. 5,466,468, specifically incorporated herein by reference in its entirety). In all cases the form should be sterile and should be fluid to the extent that easy syringability exists. It should be stable under the conditions of manufacture and storage and should be preserved against the contaminating action of microorganisms, such as bacteria and fungi. The carrier can be a solvent or dispersion medium containing, for example, water, ethanol, polyol (e.g., glycerol, propylene glycol, and liquid polyethylene glycol, and the like), suitable mixtures thereof, and/or vegetable oils. Proper fluidity may be maintained, for example, by the use of a coating, such as lecithin, by the maintenance of the required particle size in the case of dispersion and by the use of surfactants. The prevention of the action of microorganisms can be facilitated by various antibacterial and antifungal agents, for example, parabenes, chlorobutanol, phenol, sorbic acid, thimerosal, and the like. In many cases, it will be preferable to include isotonic agents, for example, sugars or sodium chloride. Prolonged absorption of the injectable compositions can be brought about by the use in the compositions of agents delaying absorption, for example, aluminum monostearate and gelatin. The preparation of an aqueous composition that contains a protein as an active ingredient is well understood in the art. Typically, such compositions are prepared as injectables, either as liquid solutions or suspensions; solid forms suitable for solution in, or suspension in, liquid prior to injection can also be prepared. The preparation can also be emulsified.

[0502] For parenteral administration in an aqueous solution, for example, the solution should be suitably buffered if necessary and the liquid diluent first rendered isotonic with sufficient saline or glucose. These particular aqueous solutions are especially suitable for intravenous, intramuscular, subcutaneous and intraperitoneal administration. In this connection, a sterile aqueous medium that can be employed will be known to those of skill in the art in light of the present disclosure. For example, one dosage may be dissolved in 1 ml of isotonic NaCl solution and either added to 1000 ml of hypodermoclysis fluid or injected at the proposed site of infusion (see, e.g., Remington: The Science and Practice of Pharmacy, 20th Edition. Baltimore, MD: Lippincott Williams & Wilkins, 2000). Some variation in dosage will necessarily occur depending on the condition of the subject being treated. The person responsible for administration will, in any event, determine the appropriate dose for the individual subject. Moreover, for human administration, preparations should meet sterility, pyrogenicity, and the general safety and purity standards as required by FDA Office of Biologics standards.

[0503] Sterile injectable solutions can be prepared by incorporating the active compounds in the required amount in the appropriate solvent with the various other ingredients enumerated above, as required, followed by filtered sterilization. Generally, dispersions are prepared by incorporating the various sterilized active ingredients into a sterile vehicle which contains the basic dispersion medium and the required other ingredients from those enumerated above. In the case of sterile powders for the preparation of sterile injectable solutions, the preferred methods of preparation are vacuum-drying and freeze-drying techniques which yield a powder of the active ingredient plus any additional desired ingredient from a previously sterile-filtered solution thereof.

[0504] In certain embodiments, the compositions may be delivered by intranasal sprays, inhalation, and/or other aerosol delivery vehicles. Methods for delivering polynucleotides and peptide compositions directly to the lungs via nasal aerosol sprays has been described e.g., in U.S. Pat. Nos. 5,756,353 and 5,804,212 (each specifically incorporated herein by reference in its entirety). Likewise, the delivery of drugs using intranasal microparticle resins (Takenaga et al., 1998) and lysophosphatidyl-glycerol compounds (U.S. Pat. No. 5,725,871, specifically incorporated herein by reference in its entirety) are also well-known in the pharmaceutical arts. Likewise, transmucosal drug delivery in the form of a polytetrafluoroetheylene support matrix is described in U.S. Pat. No. 5,780,045 (specifically incorporated herein by reference in its entirety).

[0505] In certain embodiments, the delivery may occur by use of liposomes, nanocapsules, microparticles, microspheres, lipid particles, vesicles, optionally mixing with CPP polypeptides, and the like, for the introduction of the compositions of the present disclosure into suitable host cells. In particular, the compositions of the present disclosure may be formulated for delivery either encapsulated in a lipid particle, a liposome, a vesicle, a nanosphere, a nanoparticle or the like. The formulation and use of such delivery vehicles can be carried out using known and conventional techniques. The formulations and compositions of the disclosure may comprise one or more polypeptides, polynucleotides, and small molecules, as described herein, formulated in pharmaceutically-acceptable or physiologically-acceptable solutions (e.g., culture medium) for administration to a cell or an animal, either alone, or in combination with one or more other modalities of therapy. It will also be understood that, if desired, the compositions of the disclosure may be administered in combination with other agents as well, such as, e.g., cells, other proteins or polypeptides or various pharmaceutically-active agents.

[0506] In a particular embodiment, a formulation or composition according to the present disclosure comprises a cell contacted with a combination of any number of polynucleotides or viral vectors, as contemplated herein.

[0507] In certain aspects, the present disclosure provides formulations or compositions suitable for the delivery of viral vector systems.

[0508] Exemplary formulations for ex vivo delivery may also include the use of various transfection agents known in the art, such as calcium phosphate, electroporation, heat shock and various liposome formulations (i.e., lipid-mediated transfection). Liposomes are lipid bilayers entrapping a fraction of aqueous fluid. DNA spontaneously associates to the external surface of cationic liposomes (by virtue of its charge) and these liposomes will interact with the cell membrane.

[0509] Particular embodiments of the disclosure may comprise other formulations, such as those that are well known in the pharmaceutical art, and are described, for example, in Remington: The Science and Practice of Pharmacy, 20th Edition. Baltimore, MD: Lippincott Williams & Wilkins, 2000.

[0510] In certain aspects, the present disclosure provides pharmaceutically acceptable compositions which comprise a therapeutically effective amount of one or more viral vectors or polynucleotides, as described herein, formulated together with one or more pharmaceutically acceptable carriers (additives) and/or diluents (e.g., pharmaceutically acceptable cell culture medium). As used herein, a “therapeutically effective amount” refers to the amount of a composition or recombinant virus described herein required to achieve a desired physiologic and/or biological outcome. A “therapeutically effective amount” of a virus, a viral stock, or a composition may vary according to factors such as the disease state, age, sex, and weight of the individual, and the ability of the stem and progenitor cells to elicit a desired response in the individual. A therapeutically effective amount is also one in which any toxic or detrimental effects of the virus or transduced therapeutic cells are outweighed by the therapeutically beneficial effects. The term “therapeutically effective amount” includes an amount that is effective to “treat” a subject (e.g., a patient). The therapeutically effective amount may be quantified by the total number of plaque forming units (pfu) (e.g. at least 1e¹ to at least 1e²⁰, particularly about 1e⁴ to about 1e¹⁵, more particularly about 1e⁶ to about 1e¹² pfu), or number of viral genomes (e.g. at least 1e¹ to at least 1e²⁰, particularly about 1e⁴ to about 1e¹⁵, more particularly about 1e⁶ to about 1e¹² viral genomes). One of skill in the art will understand that the therapeutically effective amount will vary based on the type of virus being administered, nature of the formulation, route of administration, nature and/or severity of the disease to be treated, and/or general health and well-being of the subject.

[0511] Some aspects of the disclosure encompass a method of killing a cancerous cell, comprising exposing the cancerous cell to an oncolytic virus described herein or compositions thereof under conditions sufficient for the oncolytic virus to infect and replicate within said cancerous cell, and wherein replication of the oncolytic virus within the cancerous cell results in cell death. In certain embodiments, the cancerous cell has a reduced expression of a miR compared to a non-cancerous cell. In some embodiments, a cancerous cell killed by this method is in vivo. In certain embodiments, a cancerous cell killed by this method is within a tumor.

[0512] The disclosure relates to a method of treating cancer in a subject in need thereof, comprising administering a prophylactically effective amount or a therapeutically effective amount of an oncolytic virus, a viral stock, a particle, or a composition as described herein to the subject. A “subject,” as used herein, includes any animal that exhibits a symptom of a disease, disorder, or condition that can be treated with the recombinant viral vectors, compositions, and methods disclosed herein. Suitable subjects (e.g., patients) include laboratory animals (such as mouse, rat, rabbit, or guinea pig), farm animals (such as horse or cow), and domestic animals or pets (such as cat or dog). Non-human primates and, preferably, human patients, are included.

[0513] “Administration” refers herein to introducing an oncolytic virus, a viral stock, or a composition thereof into a subject or contacting an oncolytic virus, a viral stock, or a composition thereof with a cell and/or tissue. Administration can occur by injection, irrigation, inhalation, consumption, electro-osmosis, hemodialysis, iontophoresis, and other methods known in the art. The route of administration will vary, naturally, with the location and nature of the disease being treated, and may include, for example auricular, buccal, conjunctival, cutaneous, dental, endocervical, endosinusial, endotracheal, enteral, epidural, interstitial, intra-articular, intra-arterial, intra-abdominal, intraauricular, intrabiliary, intrabronchial, intrabursal, intracavernous, intracerebral, intracisternal, intracorneal, intracronal, intracoronary, intracranial, intradermal, intradiscal, intraductal, intraduodenal, intraduodenal, intradural, intraepicardial, intraepidermal, intraesophageal, intragastric, intragingival, intrahepatic, intraileal, intralesional, intralingual, intraluminal, intralymphatic, intramammary, intramedulleray, intrameningeal, instramuscular, intranasal, intranodal, intraocular, intraomentum, intraovarian, intraperitoneal, intrapericardial, intrapleural, intraprostatic, intrapulmonary, intraruminal, intrasinal, intraspinal, intrasynovial, intratendinous, intratesticular, intratracheal, intrathecal, intrathoracic, intratubular, intratumoral, intratympanic, intrauterine, intraperitoneal, intravascular, intraventricular, intravesical, intravestibular, intravenous, intravitreal, larangeal, nasal, nasogastric, oral, ophthalmic, oropharyngeal, parenteral, percutaneous, periarticular, peridural, perineural, periodontal, respiratory, retrotubular, rectal, spinal, subarachnoid, subconjunctival, subcutaneous, subdermal, subgingival, sublingual, submucosal, subretinal, topical, transdermal, transendocardial, transmucosal, transplacental, trantracheal, transtympanic, ureteral, urethral, and/or vaginal perfusion, lavage, direct injection, and oral administration.

[0514] The term “treating” and “treatment” as used herein refers to administering to a subject a therapeutically effective amount of a recombinant virus or composition thereof as described herein so that the subject has an improvement in a disease or condition, or a symptom of the disease or condition. The improvement is any improvement or remediation of the disease or condition, or symptom of the disease or condition. The improvement is an observable or measurable improvement, or may be an improvement in the general feeling of well-being of the subject. Thus, one of skill in the art realizes that a treatment may improve the disease condition, but may not be a complete cure for the disease. A “prophylactically effective amount” refers to an amount of a virus, a viral stock, or a composition effective to achieve the desired prophylactic result. As used herein, “prophylaxis” can mean complete prevention of the symptoms of a disease, a delay in onset of the symptoms of a disease, or a lessening in the severity of subsequently developed disease symptoms. Typically, but not necessarily, since a prophylactic dose is used in subjects prior to or at an earlier stage of disease, the prophylactically effective amount is less than the therapeutically effective amount.

[0515] “Cancer” herein refers to or describes the physiological condition in mammals that is typically characterized by unregulated cell growth. Examples of cancer include but are not limited to carcinoma, lymphoma, blastoma, sarcoma (including liposarcoma, osteogenic sarcoma, angiosarcoma, endotheliosarcoma, leiomyosarcoma, chordoma, lymphangiosarcoma, lymphangioendotheliosarcoma, rhabdomyosarcoma, fibrosarcoma, myxosarcoma, chondrosarcoma), neuroendocrine tumors, mesothelioma, synovioma, schwannoma, meningioma, adenocarcinoma, melanoma, and leukemia or lymphoid malignancies. More particular examples of such cancers include squamous cell cancer (e.g. epithelial squamous cell cancer), lung cancer including small-cell lung cancer, non-small cell lung cancer, adenocarcinoma of the lung and squamous carcinoma of the lung, small cell lung carcinoma, cancer of the peritoneum, hepatocellular cancer, gastric or stomach cancer including gastrointestinal cancer, pancreatic cancer, glioblastoma, cervical cancer, ovarian cancer, liver cancer, bladder cancer, hepatoma, breast cancer, colon cancer, rectal cancer, colorectal cancer, endometrial or uterine carcinoma, salivary gland carcinoma, kidney or renal cancer, prostate cancer, vulvar cancer, thyroid cancer, hepatic carcinoma, anal carcinoma, penile carcinoma, testicular cancer, esophageal cancer, tumors of the biliary tract, Ewing's tumor, basal cell carcinoma, adenocarcinoma, sweat gland carcinoma, sebaceous gland carcinoma, papillary carcinoma, papillary adenocarcinomas, cystadenocarcinoma, medullary carcinoma, bronchogenic carcinoma, renal cell carcinoma, hepatoma, bile duct carcinoma, choriocarcinoma, seminoma, embryonal carcinoma, Wilms' tumor, testicular tumor, lung carcinoma, bladder carcinoma, epithelial carcinoma, glioma, astrocytoma, medulloblastoma, craniopharyngioma, ependymoma, pinealoma, hemangioblastoma, acoustic neuroma, oligodendroglioma, meningioma, melanoma, neuroblastoma, retinoblastoma, leukemia, lymphoma, multiple myeloma, Waldenstrom's macroglobulinemia, myelodysplastic disease, heavy chain disease, neuroendocrine tumors, Schwannoma, and other carcinomas, as well as head and neck cancer.

[0516] In certain embodiments, an oncolytic virus (e.g., an HSV), a viral stock, or a composition as described herein are used to treat a cancer selected from lung cancer (e.g., small cell lung cancer or non-small cell lung cancer), breast cancer, ovarian cancer, cervical cancer, prostate cancer, testicular cancer, colorectal cancer, colon cancer, pancreatic cancer, liver cancer (e.g., hepatocellular carcinoma (HCC)), gastric cancer, head and neck cancer, thyroid cancer, malignant glioma, glioblastoma, melanoma, non-melanoma skin cancer, B-cell chronic lymphocytic leukemia, diffuse large B-cell lymphoma (DLBCL), and marginal zone lymphoma (MZL). In some embodiments, the cancer is glioblastoma.

[0517] In some embodiments, the cancer is a non-melanoma skin cancer. Non-melanoma skin cancer refers to all the types of cancer that occur in the skin that are not melanoma. In some embodiments, the non-melanoma skin cancer is angiosarcoma, basal cell carcinoma, cutaneous B-cell lymphoma, cutaneous T-cell lymphoma, dermatofibrosarcoma protuberans, merkel cell carcinoma, sebaceous carcinoma, or squamous cell carcinoma of the skin.

[0518] In certain aspects, the disclosure relates to an oncolytic viral vector as shown in any one of the figures or embodiments disclosed herein.

### Further Numbered Embodiments

[0519] Further numbered embodiments of the present disclosure are provided as follows:

[0520] Embodiment 1. A recombinant herpesvirus, wherein the viral genome of the recombinant herpesvirus:
[0521] (a) comprises one or more transgenes, optionally wherein the open reading frame(s) (ORFs) of the transgene(s) have a G/C content of at least 60%, at least 61%, at least 62%, at least 63%, or at least 64%;
[0522] (b) comprises one or more miRNA target sequences;
[0523] (c) comprises a polynucleotide encoding a retargeting domain;
[0524] (d) comprises a UL30 viral gene encoding a DNA polymerase catalytic subunit (DPCS) and a UL23 viral gene encoding a thymidine kinase (TK), wherein the DPCS comprises a mutation, and wherein the TK comprises a mutation;
[0525] (e) encodes a first gB and/or a second gB, wherein the first gB comprises a syncytial mutation, and wherein the second gB comprises no syncytial mutation;
[0526] (f) encodes a first gK and/or a second gK, wherein the first gK comprises a syncytial mutation, and wherein the second gK comprises no syncytial mutation;
[0527] (g) encodes a first gH and/or a second gH, wherein the first gH comprises a syncytial mutation, and wherein the second gH comprises no syncytial mutation;
[0528] (h) encodes a first UL20 and/or a second UL20, wherein the first UL20 comprises a syncytial mutation, and wherein the second UL20 comprises no syncytial mutation; and/or
[0529] (i) encodes a first UL24 and/or a second UL24, wherein the first UL24 comprises a syncytial mutation, and wherein the second UL24 comprises no syncytial mutation.

[0530] Embodiment 2. The recombinant herpesvirus of Embodiment 1, wherein the viral genome of the recombinant herpesvirus comprises the one or more transgenes, wherein the one or more transgenes encode one or more payload proteins selected from 15-hydroxyprostaglandin dehydrogenase [NAD(+)] (HPGD), adenosine deaminase 2 (ADA2), hyaluronidase-1 (HYAL1), hemotaxis inhibitory protein (CHP), C-C motif chemokine 21 (CCL21), interleukin-12 (IL-12), a CD47 antagonist, a transforming growth factor beta (TGFβ) antagonist, a programmed death-1 (PD1) antagonist, a triggering receptor expressed on myeloid cells-2 (TREM2) antagonist, a biomolecule comprising chlorotoxin (CTX), or any combinations thereof.

[0531] Embodiment 3. The recombinant herpesvirus of Embodiment 2, wherein the one or more payload proteins comprise or consist of IL-12, a PD1 antagonist, and a TREM2 antagonist.

[0532] Embodiment 4. The recombinant herpesvirus of Embodiment 3, wherein the one or more payload proteins comprise HPGD.

[0533] Embodiment 5. The recombinant herpesvirus of Embodiment 3 or 4, wherein the one or more payload proteins comprise a biomolecule comprising CTX.

[0534] Embodiment 6. The recombinant herpesvirus of Embodiment 2, wherein the one or

[0535] more payload proteins comprise or consist of one of the combinations of payload proteins listed in Tables 4-7.

[0536] Embodiment 7. The recombinant herpesvirus of any one of Embodiments 2-6, wherein the one or more payload proteins comprise HPGD.

[0537] Embodiment 8. The recombinant herpesvirus of any one of Embodiments 2-7, wherein the one or more payload proteins comprise ADA2.

[0538] Embodiment 9. The recombinant herpesvirus of any one of Embodiments 2-8, wherein the one or more payload proteins comprise HYAL1.

[0539] Embodiment 10. The recombinant herpesvirus of any one of Embodiments 2-9, wherein the one or more payload proteins comprise CHP.

[0540] Embodiment 11. The recombinant herpesvirus of any one of Embodiments 2-10, wherein the one or more payload proteins comprise CCL21.

[0541] Embodiment 12. The recombinant herpesvirus of any one of Embodiments 2-11, wherein the one or more payload proteins comprise IL-12.

[0542] Embodiment 13. The recombinant herpesvirus of any one of Embodiments 2-12, wherein the one or more payload proteins comprise the CD47 antagonist.

[0543] Embodiment 14. The recombinant herpesvirus of any one of Embodiments 2-13, wherein the one or more payload proteins comprise the TGFβ antagonist.

[0544] Embodiment 15. The recombinant herpesvirus of any one of Embodiments 2-14, wherein the one or more payload proteins comprise the PD1 antagonist.

[0545] Embodiment 16. The recombinant herpesvirus of any one of Embodiments 2-15, wherein the one or more payload proteins comprise the TREM2 antagonist.

[0546] Embodiment 17. The recombinant herpesvirus of any one of Embodiments 2-16, wherein the antagonist comprises an antibody or antigen binding fragment thereof.

[0547] Embodiment 18. The recombinant herpesvirus of any one of Embodiments 2-17, wherein the one or more payload proteins comprise the biomolecule comprising CTX.

[0548] Embodiment 19. The recombinant herpesvirus of Embodiment 5 or 18, wherein the biomolecule comprising CTX further comprises a T-cell engager moiety specifically binding to a protein expressed on the surface of the T-cell.

[0549] Embodiment 20. The recombinant herpesvirus of Embodiment 19, wherein the protein expressed on the surface of the T-cell is CD3.

[0550] Embodiment 21. The recombinant herpesvirus of Embodiment 20, wherein the T-cell engager moiety comprises an amino acid sequence at least 90%, at least 95%, at least 97%, at least 98%, at least 99%, or 100% identical to SEQ ID NO: 914.

[0551] Embodiment 22. The recombinant herpesvirus of any one of Embodiments 18-21, wherein the CTX comprises or consists of an amino acid sequence at least 95% identical to SEQ ID NO: 913.

[0552] Embodiment 23. The recombinant herpesvirus of any one of Embodiments 2-22, wherein:
[0553] (i) the HPGD comprises an amino acid sequence at least 90%, at least 95%, at least 97%, at least 98%, at least 99%, or 100% identical to SEQ ID NO: 875;
[0554] (ii) the ADA2 comprises an amino acid sequence at least 90%, at least 95%, at least 97%, at least 98%, at least 99%, or 100% identical to SEQ ID NO: 877;
[0555] (iii) the HYAL1 comprises an amino acid sequence at least 90%, at least 95%, at least 97%, at least 98%, at least 99%, or 100% identical to SEQ ID NO: 878;
[0556] (iv) the CHP comprises an amino acid sequence at least 90%, at least 95%, at least 97%, at least 98%, at least 99%, or 100% identical to SEQ ID NO: 880;
[0557] (v) the CCL21 comprises an amino acid sequence at least 90%, at least 95%, at least 97%, at least 98%, at least 99%, or 100% identical to SEQ ID NO: 881;
[0558] (vi) the IL-12 comprises a subunit alpha comprising an amino acid sequence at least 90%, at least 95%, at least 97%, at least 98%, at least 99%, or 100% identical to SEQ ID NO: 883 and a subunit beta comprising an amino acid sequence at least 90%, at least 95%, at least 97%, at least 98%, at least 99%, or 100% identical to SEQ ID NO: 884;
[0559] (vii) the CD47 antagonist comprises VHH CDR1 of SEQ ID NO: 895, VHH CDR2 of SEQ ID NO: 896, VHH CDR3 of SEQ ID NO: 897, and/or an amino acid sequence at least 90%, at least 95%, at least 97%, at least 98%, at least 99%, or 100% identical to SEQ ID NO:

[0560] 887 or 888;
[0561] (viii) the TGFβ antagonist comprises a heavy chain variable domain (VH) comprising CDR1 of SEQ ID NO: 898, CDR2 of SEQ ID NO: 899, and CDR3 of SEQ ID NO: 900, and/or a light chain variable domain (VL) comprising CDR1 of SEQ ID NO: 901, CDR2 of SEQ ID NO: 902, and CDR3 of SEQ ID NO: 903; optionally wherein the TGFβ antagonist comprises an amino acid sequence at least 90%, at least 95%, at least 97%, at least 98%, at least 99%, or 100% identical to SEQ ID NO: 889 or 890;
[0562] (ix) the PD1 antagonist comprises VHH CDR1 of SEQ ID NO: 904, VHH CDR2 of SEQ ID NO: 905, VHH CDR3 of SEQ ID NO: 906, and/or an amino acid sequence at least 90%, at least 95%, at least 97%, at least 98%, at least 99%, or 100% identical to SEQ ID NO: 891 or 892;
[0563] (x) the biomolecule comprising CTX comprises an amino acid sequence at least 90%, at least 95%, at least 97%, at least 98%, at least 99%, or 100% identical to SEQ ID NO: 915 or 916; and/or 891 or 892;
[0564] (xi) the TREM2 antagonist comprises a heavy chain variable domain (VH) comprising CDR1 of SEQ ID NO: 907, CDR2 of SEQ ID NO: 908, CDR3 of SEQ ID NO: 909, and/or an amino acid sequence at least 90%, at least 95%, at least 97%, at least 98%, at least 99%, or 100% identical to SEQ ID NO: 893; and/or a light chain variable domain (VL) comprising CDR1 of SEQ ID NO: 910, CDR2 of SEQ ID NO: 911, CDR3 of SEQ ID NO: 912, and/or an amino acid sequence at least 90%, at least 95%, at least 97%, at least 98%, at least 99%, or 100% identical to SEQ ID NO: 894.

[0565] Embodiment 24. The recombinant herpesvirus of any one of Embodiments 1-23, wherein the ORF of at least one of the transgene(s) has the G/C content of at least 60%, at least 61%, at least 62%, at least 63%, or at least 64%.

[0566] Embodiment 25. The recombinant herpesvirus of Embodiment 24, wherein the ORFs of all of the transgene(s) have the G/C content of at least 60%, at least 61%, at least 62%, at least 63%, or at least 64%.

[0567] Embodiment 26. The recombinant herpesvirus of Embodiment 24, wherein the ORFs of the transgene(s) encoding IL-12, the PD1 antagonist, the TREM2 antagonist, HPGD, and/or the biomolecule comprising CTX have the G/C content of at least 60%, at least 61%, at least 62%, at least 63%, or at least 64%.

[0568] Embodiment 27. The recombinant herpesvirus of any one of Embodiments 24-26, wherein the expression of a payload protein encoded by the ORF of the transgene is at least 2-fold, at least 3-fold, at least 5-fold, at least 8-fold, or at least 10-fold higher than the expression of the payload protein encoded by a control ORF having a G/C content of about 52% in a control recombinant herpesvirus; optionally wherein the control ORF is codon optimized based on the codon usage of Homo sapiens.

[0569] Embodiment 28. The recombinant herpesvirus of any one of Embodiments 24-27, wherein the ORF(s) of the transgene(s) are codon optimized based on the codon usage of Anaeromyxobacter dehalogenans.

[0570] Embodiment 29. The recombinant herpesvirus of any one of Embodiments 24-28, wherein the transgene(s) encode an antibody or antigen binding fragment thereof.

[0571] Embodiment 30. The recombinant herpesvirus of Embodiment 29, wherein the antibody or antigen binding fragment thereof comprises a heavy chain variable domain (VH) and a light chain variable domain (VL).

[0572] Embodiment 30.1 The recombinant herpesvirus of any one of Embodiments 23, 29 and 30, wherein the transgene encoding the TREM2 antagonist comprises a polynucleotide sequence at least 90%, at least 95%, at least 97%, at least 98%, at least 99%, or 100% identical to SEQ ID NO: 938.

[0573] Embodiment 31. The recombinant herpesvirus of Embodiment 29 or 30, wherein the antibody or antigen binding fragment thereof comprises a VHH domain derived from a single domain antibody (sdAb).

[0574] Embodiment 32. The recombinant herpesvirus of Embodiment 30 or 31, wherein the antibody or antigen binding fragment thereof comprises an IgG-Fc, optionally wherein the IgG is IgG1.

[0575] Embodiment 33. The recombinant herpesvirus of any one of Embodiments 23 and 29-32, wherein the transgene encoding the PD1 antagonist comprises a polynucleotide sequence at least 90%, at least 95%, at least 97%, at least 98%, at least 99%, or 100% identical to SEQ ID NO: 937.

[0576] Embodiment 34. The recombinant herpesvirus of any one of Embodiments 23 and 29-33, wherein the transgene encoding the biomolecule comprising CTX comprises a polynucleotide sequence at least 90%, at least 95%, at least 97%, at least 98%, at least 99%, or 100% identical to SEQ ID NO: 940 or 941.

[0577] Embodiment 35. The recombinant herpesvirus of any one of Embodiments 24-34, comprising the transgene(s) encoding a cytokine, a chemokine, a receptor, a receptor ligand, an enzyme, and/or a reporter protein.

[0578] Embodiment 36. The recombinant herpesvirus of Embodiment 23 or 35, wherein the transgene encoding IL-12 comprise a polynucleotide sequence at least 90%, at least 95%, at least 97%, at least 98%, at least 99%, or 100% identical to SEQ ID NO: 936.

[0579] Embodiment 37. The recombinant herpesvirus of any one of Embodiments 23 and 35-36, wherein the transgene encoding HPGD comprises a polynucleotide sequence at least 90%, at least 95%, at least 97%, at least 98%, at least 99%, or 100% identical to SEQ ID NO: 939.

[0580] Embodiment 38. The recombinant herpesvirus of any one of Embodiments 1-37, comprising the miRNA target sequences for miR-34b-5p, miR-34b-3p, miR-34c-5p, miR-122-5p, miR-124-3p, miR-128T, miR-129-5p, miR-129-2-3p, miR-132-3p, miR-137-3p, miR-145-5p, or any combination thereof.

[0581] Embodiment 39. The recombinant herpesvirus of Embodiment 38, comprising the miRNA target sequences for miR-34b-5p, miR-34c-5p, miR-122-5p, miR-124-3p, miR-128T, miR-129-2-3p, miR-132-3p, miR-137-3p, miR-145-5p, or any combination thereof.

[0582] Embodiment 40. The recombinant herpesvirus of Embodiment 38, comprising the miRNA target sequences for miR-34b-5p, miR-34c-5p, miR-122-5p, miR-124-3p, miR-128T, miR-129-2-3p, miR-132-3p, miR-137-3p, and miR-145-5p.

[0583] Embodiment 41. The recombinant herpesvirus of any one of Embodiments 38-40, comprising:
[0584] (a) one or more miRNA target sequences for miR-122-5p;
[0585] (b) one or more miRNA target sequences for miR-145-5p;
[0586] (c) one or more miRNA target sequences for miR-124-3p, miR-128T, miR-137-3p, or any combination thereof;
[0587] (d) one or more miRNA target sequences for miR-34b-5p, miR-34c-5p, or any combination thereof; and
[0588] (e) one or more miRNA target sequences for miR-129-2-3p, miR-132-3p, or any combination thereof.

[0589] Embodiment 42. The recombinant herpesvirus of any one of Embodiments 38-41, comprising a first miR-TS cassette inserted into a first viral gene, wherein the first miR-TS cassette comprises one or more miRNA target sequences for each of miR-34c-5p, miR-124-3p, miR-129-2-3p, and miR-132-3p.

[0590] Embodiment 43. The recombinant herpesvirus of Embodiment 42, wherein the miRNA target sequences in the first miR-TS cassette are arranged as (34c-5p)-(124-3p)-(132-3p)-(129-2-3p)-(34c-5p)-(124-3p)-(129-2-3p)-(132-3p)-(124-3p)-(129-2-3p)-(132-3p)-(34c-5p).

[0591] Embodiment 44. The recombinant herpesvirus of Embodiment 42 or 43, wherein the first miR-TS cassette comprises a nucleic acid sequence at least 90%, at least 95%, at least 96%, at least 97%, at least 98%, at least 99%, or 100% identical to SEQ ID NO: 859.

[0592] Embodiment 45. The recombinant herpesvirus of any one of Embodiments 42-44, wherein the first viral gene is ICP8.

[0593] Embodiment 46. The recombinant herpesvirus of any one of Embodiments 38-45, comprising a second miR-TS cassette inserted into a second viral gene, wherein the second miR-TS cassette comprises one or more miRNA target sequences for each of miR-122-5p, miR-124-3p, miR-128T, and miR-137-3p.

[0594] Embodiment 47. The recombinant herpesvirus of Embodiment 46, wherein the miRNA target sequences in the second miR-TS cassette are arranged as (137-3p)-(128T)-(122-5p)-(124-3p)-(122-5p)-(128T)-(137-3p)-(124-3p)-(128T)-(137-3p)-(124-3p)-(122-5p).

[0595] Embodiment 48. The recombinant herpesvirus of Embodiment 46 or 47, wherein the second miR-TS cassette comprises a nucleic acid sequence at least 90%, at least 95%, at least 96%, at least 97%, at least 98%, at least 99%, or 100% identical to SEQ ID NO: 858.

[0596] Embodiment 49. The recombinant herpesvirus of any one of Embodiments 46-48, wherein the second viral gene is ICP4.

[0597] Embodiment 50. The recombinant herpesvirus of Embodiments 49, comprising the second miR-TS cassette in both ICP4 viral genes of the viral genome.

[0598] Embodiment 51. The recombinant herpesvirus of any one of Embodiments 1-50, comprising one or more miRNA target sequences in both ICP4 viral genes of the viral genome; optionally wherein the miRNA target sequences are the same in both said ICP4 viral genes.

[0599] Embodiment 52. The recombinant herpesvirus of any one of Embodiments 38-51, comprising a third miR-TS cassette inserted into a third viral gene, wherein the third miR-TS cassette comprises one or more miRNA target sequences for each of miR-34c-5p, miR-124-3p, miR-128T, and miR-137-3p.

[0600] Embodiment 53. The recombinant herpesvirus of Embodiment 52, wherein the miRNA target sequences in the third miR-TS cassette are arranged as (124-3p)-(128T)-(34c-5p)-(137-3p)-(128T)-(34c-5p)-(137-3p)-(124-3p)-(128T)-(137-3p)-(124-3p)-(34c-5p).

[0601] Embodiment 54. The recombinant herpesvirus of Embodiment 52 or 53, wherein the third miR-TS cassette comprises a nucleic acid sequence at least 90%, at least 95%, at least 96%, at least 97%, at least 98%, at least 99%, or 100% identical to SEQ ID NO: 873.

[0602] Embodiment 55. The recombinant herpesvirus of any one of Embodiments 38-51, comprising a third miR-TS cassette inserted into a third viral gene, wherein the third miR-TS cassette comprises one or more miRNA target sequences for each of miR-34b-3p, miR-34c-5p, miR-128T, miR-137-3p.

[0603] Embodiment 56. The recombinant herpesvirus of any one of Embodiments 52-55, wherein the third viral gene is ICP27.

[0604] Embodiment 57. The recombinant herpesvirus of any one of Embodiments 38-56, comprising a fourth miR-TS cassette inserted into a fourth viral gene, wherein:
[0605] (i) the fourth miR-TS cassette comprises one or more miRNA target sequences for each of miR-34b-5p, miR-34c-5p, miR-129-5p, and miR-145-5p;
[0606] (ii) the fourth miR-TS cassette comprises one or more miRNA target sequences for each of miR-34b-5p, miR-34c-5p, miR-132-3p, and miR-145-5p; or
[0607] (iii) the fourth miR-TS cassette comprises one or more miRNA target sequences for each of miR-34b-3p, miR-34c-5p, miR-132-3p, and miR-145-5p.

[0608] Embodiment 58. The recombinant herpesvirus of any one of Embodiments 38-56, comprising a fourth miR-TS cassette inserted into a fourth viral gene, wherein the fourth miR-TS cassette comprises one or more miRNA target sequences for each of miR-34b-5p, miR-34c-5p, miR-132-3p, and miR-145-5p.

[0609] Embodiment 59. The recombinant herpesvirus of Embodiment 58, wherein the miRNA target sequences in the fourth miR-TS cassette are arranged as (145-5p)-(34b-5p)-(132-3p)-(34c-5p)-(145-5p)-(34c-5p)-(34b-5p)-(132-3p)-(34b-5p)-(145-5p)-(132-3p)-(34c-5p).

[0610] Embodiment 60. The recombinant herpesvirus of Embodiment 58 or 59, wherein the fourth miR-TS cassette comprises a nucleic acid sequence at least 90%, at least 95%, at least 96%, at least 97%, at least 98%, at least 99%, or 100% identical to SEQ ID NO: 874.

[0611] Embodiment 61. The recombinant herpesvirus of any one of Embodiments 57-60, wherein the fourth viral gene is UL8.

[0612] Embodiment 62. The recombinant herpesvirus of any one of Embodiments 42-61, wherein each of the miR-TS cassettes comprises at least 2, at least 3, or at least 4 copies of each of the miRNA target sequences.

[0613] Embodiment 63. The recombinant herpesvirus of any one of Embodiments 42-61, wherein each of the miR-TS cassettes comprises 3 copies of each of the miRNA target sequences.

[0614] Embodiment 64. The recombinant herpesvirus of any one of Embodiments 38-63, wherein the replication of the recombinant HSV is reduced in a non-cancerous cell compared to the replication of the recombinant HSV in a cancerous cell; optionally wherein the cancerous cell is a glioblastoma cell.

[0615] Embodiment 65. The recombinant herpesvirus of Embodiment 64, wherein the non-cancerous cell is selected from the group consisting of a neuron, an ependymal cell, an oligodendrocyte, an endothelial cell, a hepatocyte, an astrocyte, and any combination thereof.

[0616] Embodiment 66. The recombinant herpesvirus of Embodiment 64, wherein the non-cancerous cell is an astrocyte.

[0617] Embodiment 67. The recombinant herpesvirus of any one of Embodiments 38-66, wherein:
[0618] (a) the one or more miRNA target sequences for miR-34b-5p comprise or consist of SEQ ID NO: 867;
[0619] (b) the one or more miRNA target sequences for miR-34b-3p comprise or consist of SEQ ID NO: 868;
[0620] (c) the one or more miRNA target sequences for miR-34c-5p comprise or consist of SEQ ID NO: 869;
[0621] (d) the one or more miRNA target sequences for miR-122-5p comprise or consist of SEQ ID NO: 804;
[0622] (e) the one or more miRNA target sequences for miR-124-3p comprise or consist of SEQ ID NO: 805;
[0623] (f) the one or more miRNA target sequences for miR-128T comprise or consist of SEQ ID NO: 870;
[0624] (g) the one or more miRNA target sequences for miR-129-5p comprise or consist of SEQ ID NO: 813;
[0625] (h) the one or more miRNA target sequences for miR-129-2-3p comprise or consist of SEQ ID NO: 871;
[0626] (i) the one or more miRNA target sequences for miR-132-3p comprise or consist of SEQ ID NO: 872;
[0627] (j) the one or more miRNA target sequences for miR-137-3p comprise or consist of SEQ ID NO: 819; and/or
[0628] (k) the one or more miRNA target sequences for miR-145-5p comprise or consist of SEQ ID NO: 823.

[0629] Embodiment 68. The recombinant herpesvirus of any one of Embodiments 1-67, comprising the polynucleotide encoding the retargeting domain, wherein the retargeting domain specifically binds a target protein expressed by a target cell.

[0630] Embodiment 69. The recombinant herpesvirus of Embodiment 68, wherein the polynucleotide encoding the retargeting domain is inserted into the open reading frame of a US6 gene encoding a glycoprotein D (gD).

[0631] Embodiment 70. The recombinant herpesvirus of Embodiment 69, wherein the polynucleotide encoding the retargeting domain replaces the US6 gene region encoding an amino acid sequence corresponding to amino acids 6-24 of SEQ ID NO: 921.

[0632] Embodiment 71. The recombinant herpesvirus of any one of Embodiments 68-70, wherein the target protein expressed by the target cell comprises integrin α5β1, integrin αvβ1, integrin αvβ3, integrin αvβ6, or a combination thereof.

[0633] Embodiment 72. The recombinant herpesvirus of any one of Embodiments 68-71, wherein the target protein expressed by the target cell comprises epidermal growth factor receptor (EGFR).

[0634] Embodiment 73. The recombinant herpesvirus of any one of Embodiments 68-72, wherein the retargeting domain comprises a knottin peptide capable of specifically binding to the target protein expressed by the target cell.

[0635] Embodiment 74. The recombinant herpesvirus of Embodiment 73, wherein the retargeting domain comprises no more than 50, no more than 45, no more than 40, or no more than 35 amino acids.

[0636] Embodiment 75. The recombinant herpesvirus of Embodiment 73 or 74, wherein the retargeting domain comprises an amino acid sequence having at least 80%, at least 85%, at least 90%, or 100% identity to SEQ ID NO: 922.

[0637] Embodiment 76. The recombinant herpesvirus of any one of Embodiments 68-75, wherein the retargeting domain comprises an immunoglobulin domain capable of specifically binding to the target protein expressed by the target cell.

[0638] Embodiment 77. The recombinant herpesvirus of any one of Embodiments 68-76, wherein the retargeting domain comprises a binding domain of, or a binding domain derived from, a variable domain of a heavy chain-only antibody (VHH) or a variable domain of new antigen receptor immunoglobulin (V-NAR).

[0639] Embodiment 78. The recombinant herpesvirus of Embodiment 76 or 77, wherein the retargeting domain comprises no more than 150, no more than 140, or no more than 130 amino acids.

[0640] Embodiment 79. The recombinant herpesvirus of any one of Embodiments 76-78, wherein the retargeting domain comprises an amino acid sequence having at least 80%, at least 85%, at least 90%, or 100% identity to SEQ ID NO: 923.

[0641] Embodiment 80. The recombinant herpesvirus of any one of Embodiments 68-79, wherein the herpesvirus is capable of infecting the target cell expressing the target protein.

[0642] Embodiment 81. The recombinant herpesvirus of any one of Embodiments 68-80, wherein the herpesvirus is capable of infecting cells without Nectin-1 expression; optionally the cells are Vero cells.

[0643] Embodiment 82. The recombinant herpesvirus of any one of Embodiments 1-81, comprising the UL30 viral gene encoding the DPCS comprising the mutation and the UL23 viral gene encoding the TK comprising the mutation.

[0644] Embodiment 83. The recombinant herpesvirus of Embodiment 82, wherein the mutation in the DPCS increases DNA replication fidelity of the herpesvirus by at least 10%, at least 20%, at least 30%, at least 50%, at least 100%, at least 2-fold, at least 3-fold, or at least 5-fold.

[0645] Embodiment 84. The recombinant herpesvirus of Embodiment 82 or 83, wherein the mutation in the DPCS is at an amino acid position corresponding to L774 of SEQ ID NO: 917; preferably, the mutation is an amino acid substitution.

[0646] Embodiment 85. The recombinant herpesvirus of Embodiment 84, wherein the mutation in the DPCS is the amino acid substitution corresponding to L774F of SEQ ID NO: 917.

[0647] Embodiment 86. The recombinant herpesvirus of any one of Embodiments 82-85, wherein the DPCS comprises an amino acid sequence at least 90%, at least 95%, at least 97%, at least 98%, at least 99%, or 100% identical to SEQ ID NO: 917, except for the mutation in the DPCS.

[0648] Embodiment 87. The recombinant herpesvirus of any one of Embodiments 82-86, wherein the IC50 of acyclovir is less than 0.5 ug/ml, less than 1.0 ug/ml, less than 1.5 ug/ml, or less than 2.0 ug/ml for the herpesvirus.

[0649] Embodiment 88. The recombinant herpesvirus of any one of Embodiments 82-87, wherein the mutation in the TK decreases the IC50 of acyclovir for the herpesvirus by at least 1-fold, at least 2-fold, at least 5-fold, at least 10-fold, at least 20-fold, at least 50-fold, or at least 100-fold.

[0650] Embodiment 89. The recombinant herpesvirus of any one of Embodiments 82-88, wherein the mutation in the TK is at one or more amino acid positions corresponding to L159, 1160, F161, A168 and/or L169 of SEQ ID NO: 918; preferably, the mutation is amino acid substitution.

[0651] Embodiment 90. The recombinant herpesvirus of Embodiment 89, wherein the mutation in the TK comprises one or more amino acid substitutions of:
[0652] (a) L159I or L159L;
[0653] (b) I160L or I160F;
[0654] (c) F161A, F161V, F161P, or F161L;
[0655] (d) A168D, A168Y, A168V or A168F; and/or
[0656] (e) L169F, L169Y, L169L, L169I, L169M, L169N, or L169K.

[0657] Embodiment 91. The recombinant herpesvirus of any one of Embodiments 82-90, wherein the mutation in the TK comprises amino acid substitutions corresponding to L159I, I160F, F161L, A168F and L169M of SEQ ID NO: 918.

[0658] Embodiment 92. The recombinant herpesvirus of any one of Embodiments 82-90, wherein the mutation in the TK comprises amino acid substitutions corresponding to I160F, F161A, and A168F of SEQ ID NO: 918.

[0659] Embodiment 93. The recombinant herpesvirus of any one of Embodiments 82-90, wherein the mutation in the TK comprises amino acid substitutions corresponding to I160F, F161L, A168F, and L169N of SEQ ID NO: 918.

[0660] Embodiment 94. The recombinant herpesvirus of any one of Embodiments 82-93, wherein the TK comprises an amino acid sequence at least 90%, at least 95%, at least 97%, at least 98%, at least 99%, or 100% identical to SEQ ID NO: 918, except the mutation in the TK.

[0661] Embodiment 95. The recombinant herpesvirus of any one of Embodiments 1-94, wherein the viral genome of the herpesvirus encodes:
[0662] (i) the first gB and/or the second gB, wherein the first gB comprises the syncytial mutation, and wherein the second gB comprises no syncytial mutation;
[0663] (ii) the first gK and/or the second gK, wherein the first gK comprises the syncytial mutation, and wherein the second gK comprises no syncytial mutation;
[0664] (iii) the first gH and/or the second gH, wherein the first gH comprises the syncytial mutation, and wherein the second gH comprises no syncytial mutation;
[0665] (iv) the first UL20 and/or the second UL20, wherein the first UL20 comprises the syncytial mutation, and wherein the second UL20 comprises no syncytial mutation; and/or
[0666] (v) the first UL24 and/or the second UL24, wherein the first UL24 comprises the syncytial mutation, and wherein the second UL24 comprises no syncytial mutation.

[0667] Embodiment 96. The recombinant herpesvirus of Embodiment 95, wherein the first gB is encoded by an endogenous gB-encoding gene locus and the second gB is encoded by an exogenous expression cassette.

[0668] Embodiment 97. The recombinant herpesvirus of Embodiment 95, wherein the first gB is encoded by an exogenous expression cassette and the second gB is encoded by an endogenous gB-encoding gene locus.

[0669] Embodiment 98. The recombinant herpesvirus of any one of Embodiments 95-97, wherein the first gK is encoded by an endogenous gK-encoding gene locus and the second gK is encoded by an exogenous expression cassette.

[0670] Embodiment 99. The recombinant herpesvirus of any one of Embodiments 95-97, wherein the first gK is encoded by an exogenous expression cassette and the second gK is encoded by an endogenous gK-encoding gene locus.

[0671] Embodiment 100. The recombinant herpesvirus of any one of Embodiments 95-99, wherein the first gH is encoded by an endogenous gH-encoding gene locus and the second gH is encoded by an exogenous expression cassette.

[0672] Embodiment 101. The recombinant herpesvirus of any one of Embodiments 95-99, wherein the first gH is encoded by an exogenous expression cassette and the second gH is encoded by an endogenous gH-encoding gene locus.

[0673] Embodiment 102. The recombinant herpesvirus of any one of Embodiments 95-101, wherein the first UL20 is encoded by an endogenous UL20 gene locus and the second UL20 is encoded by an exogenous expression cassette.

[0674] Embodiment 103. The recombinant herpesvirus of any one of Embodiments 95-101, wherein the first UL20 is encoded by an exogenous expression cassette and the second UL20 is encoded by an endogenous UL20 gene locus.

[0675] Embodiment 104. The recombinant herpesvirus of any one of Embodiments 95-103, wherein the first UL24 is encoded by an endogenous UL24 gene locus and the second UL24 is encoded by an exogenous expression cassette.

[0676] Embodiment 105. The recombinant herpesvirus of any one of Embodiments 95-103, wherein the first UL24 is encoded by an exogenous expression cassette and the second UL24 is encoded by an endogenous UL24 gene locus.

[0677] Embodiment 106. The recombinant herpesvirus of any one of Embodiments 95-105, wherein the viral genome of the herpesvirus encodes the first gB but not the second gB.

[0678] Embodiment 107. The recombinant herpesvirus of any one of Embodiments 95-106, wherein the viral genome of the herpesvirus encodes the first gK but not the second gK.

[0679] Embodiment 108. The recombinant herpesvirus of any one of Embodiments 95-107, wherein the viral genome of the herpesvirus encodes the first gH but not the second gH.

[0680] Embodiment 109. The recombinant herpesvirus of any one of Embodiments 95-108, wherein the viral genome of the herpesvirus encodes the first UL20 but not the second UL20

[0681] Embodiment 110. The recombinant herpesvirus of any one of Embodiments 95-109, wherein the viral genome of the herpesvirus encodes the first UL24 but not the second UL24.

[0682] Embodiment 111. The recombinant herpesvirus of any one of Embodiments 95-110, wherein the viral genome of the herpesvirus encodes the first gB and the first gK; optionally, wherein the viral genome of the herpesvirus further encodes the first gH and the first UL24.

[0683] Embodiment 112. The recombinant herpesvirus of any one of Embodiments 96-111, wherein the exogenous expression cassette is located at UL3-UL4 intergenic region.

[0684] Embodiment 113. The recombinant herpesvirus of any one of Embodiments 96-111, wherein the exogenous expression cassette is located at UL50-UL51 intergenic region.

[0685] Embodiment 114. The recombinant herpesvirus of any one of Embodiments 95-113, wherein the recombinant herpesvirus displays syncytial phenotype in cancer cells.

[0686] Embodiment 115. A cell, comprising a recombinant nucleic acid encoding the recombinant herpesvirus of any one of Embodiments 95-114.

[0687] Embodiment 116. A cell, comprising a first nucleic acid encoding a recombinant herpesvirus and a second nucleic acid, wherein:
[0688] (i) the viral genome of the herpesvirus encodes a first gB, wherein the first gB comprises a syncytial mutation, the second nucleic acid encodes a second gB, wherein the second gB comprises no syncytial mutation; or, the viral genome of the herpesvirus encodes a second gB, wherein the second gB comprises no syncytial mutation, the second nucleic acid encodes a first gB, wherein the first gB comprises a syncytial mutation;
[0689] (ii) the viral genome of the herpesvirus encodes a first gK, wherein the first gK comprises a syncytial mutation, the second nucleic acid encodes a second gK, wherein the second gK comprises no syncytial mutation; or the viral genome of the herpesvirus encodes a second gK, wherein the second gK comprises no syncytial mutation, the second nucleic acid encodes a first gK, wherein the first gK comprises a syncytial mutation;
[0690] (iii) the viral genome of the herpesvirus encodes a first gH, wherein the first gH comprises a syncytial mutation, the second nucleic acid encodes a second gH, wherein the second gH comprises no syncytial mutation; or the viral genome of the herpesvirus encodes a second gH, wherein the second gH comprises no syncytial mutation, the second nucleic acid encodes a first gH, wherein the first gH comprises a syncytial mutation;
[0691] (iv) the viral genome of the herpesvirus encodes a first UL20, wherein the first UL20 comprises a syncytial mutation, the second nucleic acid encodes a second UL20, wherein the second UL20 comprises no syncytial mutation; or the viral genome of the herpesvirus encodes a second UL20, wherein the second UL20 comprises no syncytial mutation, the second nucleic acid encodes a first UL20, wherein the first UL20 comprises a syncytial mutation; and/or
[0692] (v) the viral genome of the herpesvirus encodes a first UL24, wherein the first UL24 comprises a syncytial mutation, the second nucleic acid encodes a second UL24, wherein the second UL24 comprises no syncytial mutation; or the viral genome of the herpesvirus encodes a second UL24, wherein the second UL24 comprises no syncytial mutation, the second nucleic acid encodes a first UL24, wherein the first UL24 comprises a syncytial mutation.

[0693] Embodiment 117. The cell of Embodiment 116, wherein the viral genome of the herpesvirus encodes the first gB, wherein the first gB comprises the syncytial mutation, wherein the second nucleic acid encodes the second gB, wherein the second gB comprises no syncytial mutation.

[0694] Embodiment 118. The cell of Embodiment 116, wherein the viral genome of the herpesvirus encodes the second gB, wherein the second gB comprises no syncytial mutation, wherein the second nucleic acid encodes the first gB, wherein the first gB comprises the syncytial mutation.

[0695] Embodiment 119. The cell of any one of Embodiments 116-118, wherein the viral genome of the herpesvirus encodes the first gK, wherein the first gK comprises the syncytial mutation, wherein the second nucleic acid encodes the second gK, wherein the second gK comprises no syncytial mutation.

[0696] Embodiment 120. The cell of any one of Embodiments 116-118, wherein the viral genome of the herpesvirus encodes the second gK, wherein the second gK comprises no syncytial mutation, wherein the second nucleic acid encodes the first gK, wherein the first gK comprises the syncytial mutation.

[0697] Embodiment 121. The cell of any one of Embodiments 116-120, wherein the viral genome of the herpesvirus encodes the first gH, wherein the first gH comprises the syncytial mutation, wherein the second nucleic acid encodes the second gH, wherein the second gH comprises no syncytial mutation.

[0698] Embodiment 122. The cell of any one of Embodiments 116-120, wherein the viral genome of the herpesvirus encodes the second gH, wherein the second gH comprises no syncytial mutation, wherein the second nucleic acid encodes the first gH, wherein the first gH comprises the syncytial mutation.

[0699] Embodiment 123. The cell of any one of Embodiments 116-122, wherein the viral genome of the herpesvirus encodes the first UL20, wherein the first UL20 comprises the syncytial mutation, wherein the second nucleic acid encodes the second UL20, wherein the second UL20 comprises no syncytial mutation.

[0700] Embodiment 124. The cell of any one of Embodiments 116-122, wherein the viral genome of the herpesvirus encodes the second UL20, wherein the second UL20 comprises no syncytial mutation, wherein the second nucleic acid encodes the first UL20, wherein the first UL20 comprises the syncytial mutation.

[0701] Embodiment 125. The cell of any one of Embodiments 116-124, wherein the viral genome of the herpesvirus encodes the first UL24, wherein the first UL24 comprises the syncytial mutation, wherein the second nucleic acid encodes the second UL24, wherein the second UL24 comprises no syncytial mutation.

[0702] Embodiment 126. The cell of any one of Embodiments 116-124, wherein the viral genome of the herpesvirus encodes the second UL24, wherein the second UL24 comprises no syncytial mutation, wherein the second nucleic acid encodes the first UL24, wherein the first UL24 comprises the syncytial mutation.

[0703] Embodiment 127. The cell of any of Embodiments 116-126, wherein the recombinant herpesvirus comprises a single copy of gB-encoding viral gene, a single copy of gK-encoding viral gene, a single copy of gH-encoding viral gene, a single copy of UL20 viral gene, and/or a single copy of UL24 viral gene.

[0704] Embodiment 128. The cell of any of Embodiments 116-127, wherein the first nucleic acid and the second nucleic acid are comprised within a single polynucleotide molecule.

[0705] Embodiment 129. The cell of any of Embodiments 116-127, wherein the first nucleic acid and the second nucleic acid are comprised within two different polynucleotide molecules.

[0706] Embodiment 130. The cell of any of Embodiments 115-129, wherein the cell is a Vero cell.

[0707] Embodiment 131. The recombinant herpesvirus of any of Embodiments 95-114 or the cell of any of Embodiments 115-130, wherein the gB syncytial mutation comprises a mutation at one or more amino acid residues corresponding to R796, R800, T813, L817, S854, A855, R858, or A874, an insertion between E816 and L817, a deletion of S869 to C-terminus, a deletion of T877 to C-terminus, or a combination thereof, of SEQ ID NO: 919.

[0708] Embodiment 132. The recombinant herpesvirus of any of Embodiments 95-114 or the cell of any of Embodiments 115-130, wherein the gB syncytial mutation comprises one or more mutations corresponding to R796C, R800W, T813I, L817H, L817P, S854F, A855V, R858C, R858H, A874P, an insertion of VN or VNVN between E816 and L817, a deletion of S869 to C-terminus, or a deletion of T877 to C-terminus, of SEQ ID NO: 919.

[0709] Embodiment 133. The recombinant herpesvirus of any of Embodiments 95-114 or the cell of any of Embodiments 115-130, wherein the gB syncytial mutation comprises a deletion of T877 to C-terminus according to SEQ ID NO: 919.

[0710] Embodiment 134. The recombinant herpesvirus of any of Embodiments 95-114 and 131-133, or the cell of any of Embodiments 115-133, wherein the first and/or the second gB comprise a mutation corresponding to D285N and/or A549T of SEQ ID NO: 919.

[0711] Embodiment 135. The recombinant herpesvirus of any of Embodiments 95-114 and 131-134, or the cell of any of Embodiments 115-134, wherein the gK syncytial mutation comprises a mutation at one or more amino acid residues corresponding to P33, A40, L86, D99, A111, L118, T121, C243, L304, 1307, or R310 of SEQ ID NO: 920.

[0712] Embodiment 136. The recombinant herpesvirus of any of Embodiments 95-114 and 131-134, or the cell of any of Embodiments 115-134, wherein the gK syncytial mutation comprises one or more mutations corresponding to P33S, A40V, A40T, L86P, D99N, A111V, L118Q, T121I, C243Y, L304P, 1307N, or R310L of SEQ ID NO: 920.

[0713] Embodiment 137. The recombinant herpesvirus of any of Embodiments 95-114 and 131-134, or the cell of any of Embodiments 115-134, wherein the gK syncytial mutation comprises 1307N according to SEQ ID NO: 920.

[0714] Embodiment 138. The recombinant herpesvirus of any of Embodiments 95-114 and 131-137, or the cell of any of Embodiments 115-137, wherein the gH syncytial mutation comprises a mutation at one or more amino acid residues corresponding to N753 or A778 of SEQ ID NO: 943.

[0715] Embodiment 139. The recombinant herpesvirus of any of Embodiments 95-114 and 131-137, or the cell of any of Embodiments 115-137, wherein the gH syncytial mutation comprises one or more mutations corresponding to N753K or A778V of SEQ ID NO: 943.

[0716] Embodiment 140. The recombinant herpesvirus of any of Embodiments 95-114 and 131-139, or the cell of any of Embodiments 115-139, wherein the UL20 syncytial mutation comprises a mutation at one or more amino acid residues corresponding to Y49, S50, R51, R209, T212, R213, or C-terminal deletion after N217, of SEQ ID NO: 944.

[0717] Embodiment 141. The recombinant herpesvirus of any of Embodiments 95-114 and 131-139, or the cell of any of Embodiments 115-139, wherein the UL20 syncytial mutation comprises one or more mutations corresponding to Y49A, S50A, R51A, R209A, T212A, R213A, or C-terminal deletion after N217, of SEQ ID NO: 944.

[0718] Embodiment 142. The recombinant herpesvirus of any of Embodiments 95-114 and 131-141, or the cell of any of Embodiments 115-141, wherein the UL24 syncytial mutation comprises a mutation at one or more amino acid residues corresponding to T64, R63, or V64 of SEQ ID NO: 942.

[0719] Embodiment 143. The recombinant herpesvirus of any of Embodiments 95-114 and 131-141, or the cell of any of Embodiments 115-141, wherein the UL24 syncytial mutation comprises one or more mutations corresponding to T64G, R63V, or V64S of SEQ ID NO: 942.

[0720] Embodiment 144. The recombinant herpesvirus of any of Embodiments 95-114 and 131-143, or the cell of any of Embodiments 115-143, wherein the open reading frame encoding the first gB is operably linked to a CMV promoter and/or a bGH poly A tail.

[0721] Embodiment 145. The recombinant herpesvirus of any of Embodiments 95-114 and 131-143, or the cell of any of Embodiments 115-143, wherein the open reading frame encoding the second gB is operably linked to a CMV promoter and/or a bGH poly A tail.

[0722] Embodiment 146. The recombinant herpesvirus of any of Embodiments 95-114 and 131-145, or the cell of any of Embodiments 115-145, wherein the open reading frame encoding the first gK is operably linked to a CMV promoter and/or a bGH poly A tail.

[0723] Embodiment 147. The recombinant herpesvirus of any of Embodiments 95-114 and 131-145, or the cell of any of Embodiments 115-145, wherein the open reading frame encoding the second gK is operably linked to a CMV promoter and/or a bGH polyA tail.

[0724] Embodiment 148. The recombinant herpesvirus of any of Embodiments 95-114 and 131-147, or the cell of any of Embodiments 115-147, wherein the yield of the recombinant herpesvirus is at least 1-fold, at least 2-fold, at least 3-fold, at least 5-fold, at least 8-fold, at least 10-fold, at least 20-fold, at least 50-fold, at least 100-fold, at least 200-fold, at least 500-fold, or at least 1000-fold higher than the yield of a control herpesvirus or a control cell that does not encode the second gB, the second gK, the second gH, the second UL20, or the second UL24.

[0725] Embodiment 149. The recombinant herpesvirus of any of Embodiments 95-114 and 131-148, or the cell of any of Embodiments 115-148, wherein the gene encoding the first gB comprises a miRNA target sequence (miR-TS) cassette, wherein the miR-TS cassette comprises one or more target sequences of one or more miRNAs.

[0726] Embodiment 150. The recombinant herpesvirus of any of Embodiments 95-114 and 131-149, or the cell of any of Embodiments 115-149, wherein the gene encoding the first gK comprises a miRNA target sequence (miR-TS) cassette, wherein the miR-TS cassette comprises one or more target sequences of one or more miRNAs.

[0727] Embodiment 151. The recombinant herpesvirus of any of Embodiments 95-114 and 131-150, or the cell of any of Embodiments 115-150, wherein the gene encoding the first gH comprises a miRNA target sequence (miR-TS) cassette, wherein the miR-TS cassette comprises one or more target sequences of one or more miRNAs.

[0728] Embodiment 152. The recombinant herpesvirus of any of Embodiments 95-114 and 131-151, or the cell of any of Embodiments 115-151, wherein the gene encoding the first UL20 comprises a miRNA target sequence (miR-TS) cassette, wherein the miR-TS cassette comprises one or more target sequences of one or more miRNAs.

[0729] Embodiment 153. The recombinant herpesvirus of any of Embodiments 95-114 and 131-152, or the cell of any of Embodiments 115-152, wherein the gene encoding the first UL24 comprises a miRNA target sequence (miR-TS) cassette, wherein the miR-TS cassette comprises one or more target sequences of one or more miRNAs.

[0730] Embodiment 154. The recombinant herpesvirus of any one of Embodiments 149-153, or the cell of any one of Embodiments 149-153, wherein the one or more miRNAs comprise at least one of miR-34c-5p, miR-299-5p, and miR-582-5p.

[0731] Embodiment 155. The recombinant herpesvirus of any one of Embodiments 149-153, or the cell of any one of Embodiments 149-153, wherein the one or more miRNAs comprise at least two of miR-34c-5p, miR-299-5p, and miR-582-5p.

[0732] Embodiment 156. The recombinant herpesvirus of any one of Embodiments 149-153, or the cell of any one of Embodiments 149-153, wherein the one or more miRNAs comprise miR-34c-5p, miR-299-5p, and miR-582-5p.

[0733] Embodiment 157. The recombinant herpesvirus or the cell of any of Embodiments 149-156, wherein the miR-TS cassette comprises at least three copies, or at least four copies of the target sequences of each of the miRNA separated by a 4 bp spacer.

[0734] Embodiment 158. The recombinant herpesvirus or the cell of any of Embodiments 149-157, wherein the miR-TS cassette is located at the 3′UTR of the gene.

[0735] Embodiment 159. The recombinant herpesvirus or the cell of any of Embodiments 149-158, wherein the target sequence of the miRNA comprises or consists of the reverse complement of the miRNA.

[0736] Embodiment 160. The recombinant herpesvirus or the cell of any of Embodiments 149-159, wherein the miR-TS cassette comprises the polynucleotide sequence of SEQ ID NO: 930.

[0737] Embodiment 161. The recombinant herpesvirus or the cell of any of Embodiments 149-160, wherein the yield of the recombinant herpesvirus is at least 1-fold, at least 2-fold, at least 3-fold, at least 5-fold, at least 8-fold, at least 10-fold, at least 20-fold, at least 50-fold, at least 100-fold, at least 200-fold, at least 500-fold, or at least 1000-fold higher than the yield of a control herpesvirus or a control cell that does not comprise the miR-TS cassette.

[0738] Embodiment 162. A recombinant herpesvirus produced by culturing the cell of any of Embodiments 115-161 and recovering the recombinant herpesvirus from the cell culture.

[0739] Embodiment 163. A recombinant herpesvirus, wherein the viral genome of the herpesvirus encodes a gK comprising a syncytial mutation corresponding to 1307N of SEQ ID NO: 920.

[0740] Embodiment 164. The recombinant herpesvirus of any one of Embodiments 1-114 and 131-163, or the cell of any of Embodiments 115-161, wherein the herpesvirus is an alphaherpesvirus.

[0741] Embodiment 165. The recombinant herpesvirus or the cell of Embodiment 164, wherein the alphaherpesvirus is a herpes simplex virus.

[0742] Embodiment 166. The recombinant herpesvirus or the cell of Embodiment 165, wherein the herpes simplex virus is a herpes simplex virus-1 (HSV-1).

[0743] Embodiment 167. The recombinant herpesvirus of any one of Embodiments 1-114 and 131-166, or the cell of any of Embodiments 115-161 and 164-166, wherein the recombinant herpesvirus is oncolytic.

[0744] Embodiment 168. The recombinant herpesvirus or the cell of any one of Embodiments 164-167, wherein the recombinant herpesvirus is derived from an encephalitic HSV isolate according to SEQ ID NO: 857; optionally wherein the recombinant herpesvirus comprises a polynucleotide sequence having at least 80%, at least 85%, at least 90%, at least 95%, at least 96%, at least 97%, at least 98%, at least 99%, at least 99.5%, or 100% identity to SEQ ID NO: 857.

[0745] Embodiment 169. The recombinant herpesvirus or the cell of any one of Embodiments 164-168, wherein the recombinant herpesvirus is defective for anterograde transport.

[0746] Embodiment 170. The recombinant herpesvirus of any one of Embodiments 1-114 and 131-169, comprising a mutation in the UL37 viral gene.

[0747] Embodiment 171. The recombinant herpesvirus of Embodiment 170, wherein the UL37 viral gene encodes a UL37 protein comprising a mutation at at least 1, at least 2, at least 3, at least 4, or all 5 amino acid positions corresponding to Q403, E452, Q455, Q511, and R515 of SEQ ID NO: 856.

[0748] Embodiment 172. The recombinant herpesvirus of Embodiment 171, where the mutation in the UL37 viral gene comprises Q403A, E452A, Q455A, Q511A, and R515A according to SEQ ID NO: 856.

[0749] Embodiment 173. The recombinant herpesvirus of any one of Embodiments 1-114 and 131-172, encoding a gB comprising the mutations corresponding to A549T/D285N of SEQ ID NO: 919.

[0750] Embodiment 174. The recombinant herpesvirus of any one of Embodiments 1-114 and 131-173, wherein the recombinant herpesvirus retains the function of ICP6, ICP34.5, and/or ICP47.

[0751] Embodiment 175. The recombinant herpesvirus of any one of Embodiments 1-114 and 131-174, wherein the one or more transgenes are inserted in the UL50-UL51 intergenic region.

[0752] Embodiment 176. A recombinant virus comprising one or more transgenes encoding one or more payload proteins selected from HPGD, ADA2, HYAL1, CHP, CCL21, IL-12, a CD47 antagonist, a TGFβ antagonist, a PD1 antagonist, a TREM2 antagonist, a biomolecule comprising chlorotoxin (CTX), or any combinations thereof.

[0753] Embodiment 177. The recombinant virus of Embodiment 176, wherein the one or more payload proteins comprise or consist of IL-12, a PD1 antagonist, and a TREM2 antagonist.

[0754] Embodiment 178. The recombinant virus of Embodiment 177, wherein the one or more payload proteins comprise HPGD.

[0755] Embodiment 179. The recombinant virus of Embodiment 177 or 178, wherein the one or more payload proteins comprise a biomolecule comprising CTX.

[0756] Embodiment 180. The recombinant virus of Embodiment 176, wherein the one or more payload proteins comprise or consist of one of the combinations of payload proteins listed in Tables 4-7.

[0757] Embodiment 181. The recombinant virus of any one of Embodiments 176-180, wherein the one or more payload proteins comprise HPGD.

[0758] Embodiment 182. The recombinant virus of any one of Embodiments 176-181, wherein the one or more payload proteins comprise ADA2.

[0759] Embodiment 183. The recombinant virus of any one of Embodiments 176-182, wherein the one or more payload proteins comprise HYAL1.

[0760] Embodiment 184. The recombinant virus of any one of Embodiments 176-183, wherein the one or more payload proteins comprise CHP.

[0761] Embodiment 185. The recombinant virus of any one of Embodiments 176-184, wherein the one or more payload proteins comprise CCL21.

[0762] Embodiment 186. The recombinant virus of any one of Embodiments 176-185, wherein the one or more payload proteins comprise IL-12.

[0763] Embodiment 187. The recombinant virus of any one of Embodiments 176-186, wherein the one or more payload proteins comprise the CD47 antagonist.

[0764] Embodiment 188. The recombinant virus of any one of Embodiments 176-187, wherein the one or more payload proteins comprise the TGFβ antagonist.

[0765] Embodiment 189. The recombinant virus of any one of Embodiments 176-188, wherein the one or more payload proteins comprise the PD1 antagonist.

[0766] Embodiment 190. The recombinant virus of any one of Embodiments 176-189, wherein the one or more payload proteins comprise the TREM2 antagonist.

[0767] Embodiment 191. The recombinant virus of any one of Embodiments 176-190, wherein the antagonist comprises an antibody or antigen binding fragment thereof.

[0768] Embodiment 192. The recombinant virus of any one of Embodiments 176-191, wherein the one or more payload proteins comprise the biomolecule comprising CTX.

[0769] Embodiment 193. The recombinant virus of Embodiment 179 or 192, wherein the biomolecule comprising CTX further comprises a T-cell engager moiety specifically binding to a protein expressed on the surface of the T-cell.

[0770] Embodiment 194. The recombinant virus of Embodiment 193, wherein the protein expressed on the surface of the T-cell is CD3.

[0771] Embodiment 195. A recombinant virus comprising:
[0772] (a) one or more miRNA target sequences for miR-122-5p;
[0773] (b) one or more miRNA target sequences for miR-145-5p;
[0774] (c) one or more miRNA target sequences for miR-124-3p, miR-128T, miR-137-3p, or any combination thereof;
[0775] (d) one or more miRNA target sequences for miR-34b-5p, miR-34c-5p, or any combination thereof; and
[0776] (e) one or more miRNA target sequences for miR-129-2-3p, miR-132-3p, or any combination thereof.

[0777] Embodiment 196. The recombinant virus of Embodiment 195, comprising the miRNA target sequences for miR-34b-5p, miR-34c-5p, miR-122-5p, miR-124-3p, miR-128T, miR-129-2-3p, miR-132-3p, miR-137-3p, and miR-145-5p.

[0778] Embodiment 197. A recombinant virus, wherein the viral genome of the recombinant virus encodes a protein comprising a syncytial mutation and a counterpart protein without the syncytial mutation.

[0779] Embodiment 198. The recombinant virus of Embodiment 197, wherein the protein comprising the syncytial mutation and the counterpart protein without the syncytial mutation share at least 90%, at least 95%, at least 96%, at least 97%, at least 98%, at least 99%, or 100% sequence identity, except the syncytial mutation.

[0780] Embodiment 199. The recombinant virus of Embodiment 197 or 198, wherein the protein comprising the syncytial mutation is encoded by an endogenous viral gene and the counterpart protein without the syncytial mutation is encoded by an exogenous expression cassette.

[0781] Embodiment 200. The recombinant virus of Embodiment 197 or 198, wherein the protein comprising the syncytial mutation is encoded by an exogenous expression cassette and the counterpart protein without the syncytial mutation is encoded by an endogenous viral gene.

[0782] Embodiment 201. The recombinant virus of Embodiment 197 or 198, wherein both the protein comprising the syncytial mutation and the counterpart protein without the syncytial mutation are encoded by one exogenous expression cassette or by different exogenous expression cassettes.

[0783] Embodiment 202. A cell, comprising a recombinant nucleic acid encoding the recombinant virus of any one of Embodiments 197-201.

[0784] Embodiment 203. A cell, comprising a first nucleic acid encoding a recombinant virus and a second nucleic acid, wherein the viral genome of the recombinant virus encodes a protein comprising a syncytial mutation, wherein the second nucleic acid encodes a a counterpart protein without the syncytial mutation.

[0785] Embodiment 204. The cell of Embodiment 203, wherein the protein comprising the syncytial mutation and the counterpart protein without the syncytial mutation share at least 90%, at least 95%, at least 96%, at least 97%, at least 98%, at least 99%, or 100% sequence identity, except the syncytial mutation.

[0786] Embodiment 205. The recombinant virus of any one of Embodiments 197-201 or the cell of any one of Embodiments 202-204, wherein the yield of the virus is at least 1-fold, at least 2-fold, at least 3-fold, at least 5-fold, at least 8-fold, at least 10-fold, at least 20-fold, at least 50-fold, at least 100-fold, at least 200-fold, at least 500-fold, or at least 1000-fold higher than the yield of a control virus or a control cell that does not encodes the counterpart protein without the syncytial mutation.

[0787] Embodiment 206. The recombinant virus of any one of Embodiments 197-201 and 205, or the cell of any one of Embodiments 202-205, wherein the gene encoding the protein comprising the syncytial mutation comprises a miRNA target sequence (miR-TS) cassette, wherein the miR-TS cassette comprises one or more target sequences of one or more miRNAs.

[0788] Embodiment 207. The recombinant virus or the cell of Embodiment 206, wherein the one or more miRNAs comprise at least one, at least two, or all of miRNAs selected from miR-34c-5p, miR-299-5p, and miR-582-5p.

[0789] Embodiment 208. The recombinant virus or the cell of Embodiment 206 or 207, wherein the yield of the recombinant virus is at least 1-fold, at least 2-fold, at least 3-fold, at least 5-fold, at least 8-fold, at least 10-fold, at least 20-fold, at least 50-fold, at least 100-fold, at least 200-fold, at least 500-fold, or at least 1000-fold higher than the yield of a control virus or a control cell that does not comprise the miR-TS cassette.

[0790] Embodiment 209. The recombinant virus produced by culturing the cell of any of Embodiments 202-208 and recovering the recombinant herpesvirus from the cell culture.

[0791] Embodiment 210. The recombinant virus of any one of Embodiments 176-201 and 205-209, or the cell of any of Embodiments 202-208, wherein the recombinant virus is derived from a herpes simplex virus, an adenovirus, a polio virus, a vaccinia virus, a measles virus, a vesicular stomatitis virus, an orthomyxovirus, a parvovirus, a maraba virus, or a coxsackievirus.

[0792] Embodiment 211. The recombinant virus of any one of Embodiments 176-201 and 205-210, or the cell of any of Embodiments 202-208, wherein the recombinant virus is oncolytic.

[0793] Embodiment 212. A nucleic acid molecule encoding the recombinant herpesvirus of any one of Embodiments 1-114 and 131-175, or the recombinant virus of any one of Embodiments 176-201 and 205-211.

[0794] Embodiment 213. The nucleic acid molecule of Embodiment 212, wherein the nucleic acid molecule is DNA.

[0795] Embodiment 214. The nucleic acid molecule of Embodiment 212, wherein the nucleic acid molecule is RNA.

[0796] Embodiment 215. A viral stock comprising the recombinant herpesvirus of any one of Embodiments 1-114 and 131-175, or the recombinant virus of any one of Embodiments 176-201 and 205-211.

[0797] Embodiment 216. A particle comprising the nucleic acid molecule of any one of Embodiments 212-214.

[0798] Embodiment 217. The particle of Embodiment 216, wherein the particle is selected from the group consisting of a nanoparticle, an exosome, a liposome, and a lipoplex.

[0799] Embodiment 218. The particle of Embodiment 216, wherein the particle is a lipid nanoparticle.

[0800] Embodiment 219. The particle of any one of Embodiments 216-218, wherein contacting a eukaryotic cell with the particle results in production of infectious virus particles by the eukaryotic cell.

[0801] Embodiment 220. A pharmaceutical composition comprising:
[0802] (i) the recombinant herpesvirus of any one of Embodiments 1-114 and 131-175, the recombinant virus of any one of Embodiments 176-201 and 205-211, the nucleic acid molecule of any one of Embodiments 212-214, or the particle of any one of Embodiments 216-219; and
[0803] (ii) a pharmaceutically-acceptable carrier.

[0804] Embodiment 221. A method of killing a cancerous cell, comprising exposing the cancerous cell to the recombinant herpesvirus of any one of Embodiments 1-114 and 131-175, the recombinant virus of any one of Embodiments 176-201 and 205-211, the particle of any one of Embodiments 216-219, or the pharmaceutical composition of Embodiment 220, under conditions sufficient for the virus or particle to infect and the virus to replicate within said cancerous cell, and wherein replication of the virus within the cancerous cell results in cell death.

[0805] Embodiment 222. The method of Embodiment 221, wherein the cell is in vitro or in vivo.

[0806] Embodiment 223. The method of Embodiment 221 or 222, wherein the cancerous cell has a reduced expression of a miRNA capable of binding to the one or more miRNA target sequences compared to the expression of the miRNA in a non-cancerous cell.

[0807] Embodiment 224. The method of any one of Embodiments 221-223, wherein replication of the virus is increased or maintained in the cancerous cell with a reduced expression of the miR capable of binding to the one or more miRNA target sequences.

[0808] Embodiment 225. The method of any one of Embodiments 221-224, wherein the cancerous cell is a cell of lung cancer, breast cancer, ovarian cancer, cervical cancer, prostate cancer, testicular cancer, colorectal cancer, colon cancer, pancreatic cancer, liver cancer, gastric cancer, head and neck cancer, thyroid cancer, malignant glioma, glioblastoma, melanoma, non-melanoma skin cancer, B-cell chronic lymphocytic leukemia, diffuse large B-cell lymphoma (DLBCL), or marginal zone lymphoma (MZL).

[0809] Embodiment 226. The method of any one of Embodiments 221-224, wherein the cancerous cell is a glioblastoma cell.

[0810] Embodiment 227. A method of treating cancer in a subject in need thereof, comprising administering the recombinant herpesvirus of any one of Embodiments 1-114 and 131-175, the recombinant virus of any one of Embodiments 176-201 and 205-211, the particle of any one of Embodiments 216-219, or the pharmaceutical composition of Embodiment 220 to the subject.

[0811] Embodiment 228. The method of Embodiment 227, wherein the virus, the particle, or the composition is administered intravenously, subcutaneously, intratumorally, intramuscularly, or intranasally.

[0812] Embodiment 229. The method of Embodiment 227, wherein the virus, the particle, or the composition is administered intratumorally.

[0813] Embodiment 230. The method of Embodiment 227, wherein the virus, the particle, or the composition is administered intravenously.

[0814] Embodiment 231. The method of any one of Embodiments 227-230, wherein the virus, the particle, or the composition is administered only once.

[0815] Embodiment 232. The method of any one of Embodiments 227-231, wherein the cancer is selected from the group consisting of lung cancer, breast cancer, ovarian cancer, cervical cancer, prostate cancer, testicular cancer, colorectal cancer, colon cancer, pancreatic cancer, liver cancer, gastric cancer, head and neck cancer, thyroid cancer, malignant glioma, glioblastoma, melanoma, non-melanoma skin cancer, B-cell chronic lymphocytic leukemia, diffuse large B-cell lymphoma (DLBCL), and marginal zone lymphoma (MZL).

[0816] Embodiment 233. The method of any one of Embodiments 227-231, wherein the cancer is glioblastoma.

[0817] Embodiment 234. A cell line, comprising the cell of any of Embodiments 115-160 and 202-208.

[0818] Embodiment 235. A method of producing a recombinant herpesvirus, comprising culturing the cell of any of Embodiments 115-160 and 202-208, or the cell line of Embodiment 234, and recovering the recombinant herpesvirus from the cell culture.

[0819] Embodiment 236. The recombinant herpesvirus of any one of Embodiments 82-114 and 131-175 for use in combination with a small molecule for imaging the infection site of the herpesvirus.

[0820] Embodiment 237. A method of imaging the infection site of an herpesvirus in vivo, comprising administering the recombinant herpesvirus of any one of Embodiments 82-114 and 131-175 and a small molecule.

[0821] Embodiment 238. The recombinant virus for use of Embodiment 236 or the method of Embodiment 237, wherein the small molecule is radioisotope labeled acyclovir; optionally wherein the radioisotope label comprises fluorine-18 (18F) label.

### EXAMPLES

[0822] The following examples for the purpose of illustrating various embodiments of the disclosure and are not meant to limit the present disclosure in any fashion. The present examples, along with the methods described herein, are exemplary, and are not intended as limitations on the scope of the disclosure. Alterations, modifications, and other changes to the described embodiments which are encompassed within the spirit of the disclosure as defined by the scope of the claims are specifically contemplated.

### Example 1—Construction of HSV Backbone for Glioblastoma Treatment

[0823] An HSV backbone vector (termed “ONCR-GBM”) was engineered based on an encephalitic HSV isolate (SEQ ID NO: 857) that is defective for anterograde transport. As illustrated in FIG. 1, the modifications included: a bacterial artificial chromosome (BAC) sequence inserted in the intergenic region between UL40-UL41 viral genes; D285N/A549T double mutations (“NT” mutations) introduced into the UL27 viral gene encoding gB to enhance cell entry; and the Q403A/E452A/Q455A/Q511A/R515A combo mutations (“R2” mutations) introduced into the UL37 viral gene to disrupt retrograde transport. The ICP47, ICP34.5, and ICP6 genes were unaltered. cDNA encoding the payload molecule(s) may be inserted into the intergenic region between UL50-UL51 viral genes. Based on this HSV backbone, several miR-attenuated recombinant HSV vector were generated: the “ONCR-GBM ICP4-miRT” HSV vector comprises a miR-TS cassette of SEQ ID NO: 858 inserted into ICP4; the “ONCR-GBM ICP4-miRT ICP8-miRT” HSV vector comprises the miR-TS cassette of SEQ ID NO: 858 inserted into ICP4 and an additional miR-TS cassette of SEQ ID NO: 859 inserted into ICP8.

### Example 2—Engineering of miRNA Target Sequence Cassettes

[0824] Several miRNAs with reduced expression in glioblastoma cells compared to normal brain cells were identified using purified cell populations. As shown in FIG. 2A, such miRNAs include miR-128-3p, miR-129-2-3p, miR-124-3p, miR-137-3p, and miR-132-3p. FIG. 2B shows that miR-34c-5p and miR-34b-3p were highly expressed in ependymal cells so the corresponding miR target sequences could be used to inhibit the replication of the oncolytic virus in ependymal cells. Such findings were then validated using in situ hybridization and/or antibody staining to localize the miRNA expression to specific cell types. For example, FIG. 2C upper row shows that miR-124-3p was highly expressed in neurons but not oligodendrocytes, and FIG. 2C lower row shows that miR-34c-5p was highly expressed in ependymal cells (which was characterized with high expression of biomarker Ccdc153).

[0825] In vitro cell experiments were used to test whether the replication of the “ONCR-GBM ICP4-miRT ICP8-miRT” HSV vector could be attenuated by the corresponding miRNAs. This HSV vector comprises miRNA target sequences for miR-122-5p, miR-124-3p, miR-128T, and miR-137-3p in ICP4 and miRNA target sequences for miR-34c-5p, miR-124-3p, miR-129-2-3p, miR-132-3p in ICP27. To evaluate miRNA mediated attenuation, each of the corresponding miRNA mimic was added to the supernatant of cells infected with the HSV vector, and the replication capability of the HSV in each condition was analyzed based on the final count of plaque forming units. As shown in FIG. 3B, insertion of the miRNA target sequences into ICP4 or ICP8 effectively suppressed viral replication of the HSV vector at the presence of each corresponding miRNA.

[0826] Next, growth kinetics study was performed to test the effect of miR-TS cassettes on the propagation of the engineered HSV vectors “ONCR-GBM ICP4-miRT” and “ONCR-GBM ICP4-miRT ICP8-miRT” as described in Example 1 above. These vectors were tested for propagation in Vero cells and GBM cells. The results show that insertion of the miR-TS cassette(s) had minimal effects on growth kinetics during propagation in Vero cells (FIG. 4A and FIG. 4B) and GBM tumor cell lines (data not shown).

### Example 3—In Vivo Studies of miR-Attenuated HSV Demonstrates Superior Safety Profile

[0827] In vivo experiments were conducted to test the safety profile of the miR-attenuated HSV oncolytic virus. The ONCR-GBM based virus in Example 2 was intracranially injected into adult C57BL/6 mice and the overall survival (FIG. 5A) and body weight change (FIG. 5B) were monitored. The results showed that ONCR-GBM virus with CNS-specific miR target sequences inserted in ICP4 and ICP8 is well tolerated at a dose of 5×10⁵ pfu. As a comparison, intracranial injection of ˜20 pfu of non-attenuated ONCR-GBM was lethal (data not shown). Therefore, the insertion of miR-TS cassettes into both ICP4 and ICP8 loci resulted in remarkably reduced neurotoxicity and a >10,000-fold increase in safety/tolerability.

### Example 4—Engineering of miR-TS Cassettes

[0828] Design of miR-TS Cassettes: MicroRNAs for protecting the desired cell types (hepatocytes, endothelial cells, neurons, ependymal cells, and oligodendrocytes) were identified by direct quantification using a fluorescent hybridization assay (nCounter miRNA Expression kit, nanoString Inc) (FIG. 6A). The corresponding miRNA target sequences for each miRNA were assembled into four individual miR-TS cassettes: miR-T 3060 (SEQ ID NO: 858), miR-T 9919 (SEQ ID NO: 859), miR-T 3012 (SEQ ID NO: 873), and miR-T 3096 (SEQ ID NO: 874). Each miR-TS cassette contained 3 copies of miRNA target sequences for 4 different miRNAs (FIG. 6B), and adjacent miRNA target sequences were separated by a 4 bp spacer. The miR-TS configuration within each cassette are shown in FIG. 6C.

[0829] Characterization of miR-TS cassettes: Each of the miR-TS cassettes were subcloned into the psiCheck2 dual Firefly/Renilla luciferase reporter vector (Promega Inc., Madison WI) such that they controlled the expression of the Renilla luciferase, but not the Firefly luciferase. Each construct was co-transfected into HEK293 cells along with the indicated miRNA mimic (mirVana Mimics, ThermoFisher Inc, Waltham MA), incubated for 2 days, and then the activity of each reporter gene was assayed using a homogeneous assay (Dual-Glo Luciferase Assay System, Promega, Madison WI). The attenuation conferred by each miR-TS cassette was calculated as the ratio of Renilla/Firefly luciferase activity and was normalized relative to that of the negative miRNA mimic control. As shown in FIG. 6D, expression of the Renilla luciferase was suppressed by the presence of each corresponding microRNA of the indicated miR-TS cassette.

[0830] In vitro Characterization of miR-TS Attenuated HSV: All four miR-TS cassettes were inserted into the corresponding HSV viral gene as shown in Table 8 below and FIG. 6B to generate the HSV virus ONCR-2169. A431 cells were transfected with 7 nM of the indicted miRNA mimic (mirVana Mimics, ThermoFisher, Waltham MA), inoculated with ONCR-2169 at a multiplicity of infection of 0.03, then incubated for 5 days to allow for virus outgrowth. The cells were harvested and then lysed through three rapid freeze-thaw cycles to release the virus. Lysates were analyzed for virus yield by plaque assay of serial dilutions on Vero cell monolayers. As shown in FIG. 7A, by targeting at least one of the miR-TS cassettes in ONCR-2169, each of the indicated miRNA mimics resulted in significant decrease of virus yield (mostly >100-fold), demonstrating successful miRNA-medicated growth attenuation.

TABLE 8
Design of miR-TS Cassettes in ONCR-2169

| | | | | | Cell Type |
|---|---|---|---|---|---|
| | | | | | Protected by |
| Viral Gene | ICP4 | ICP8 | ICP27 | UL8 | mir-TS*: |
| Cassette | miR-T 3060 | miR-T 9919 | miR-T 3012 | miR-T 3096 | Neurons |
| miR-TS | miR-122-5p | miR-34c-5p | miR-34c-5p | miR-34b-5p | Ependymal cells |
| | miR-124-3p | miR-124-3p | miR-124-3p | miR-34c-5p | Oligodendrocytes |
| | miR-128T-M | miR-129-2-3p | miR-128T-M | miR-132-3p | Endothelial cells |
| | miR-137-3p | miR-132-3p | miR-137-3p | miR-145-5p | Hepatocytes |

*Font (bold, italic, and/or underline) matches the corresponding miR-TS.

[0831] The viral growth was also analyzed in the absence of microRNA mimics. Two HSV constructs were analyzed. ONCR-2149 has a miR-T3060 cassette in both copies of ICP4 and a miR-T9919 cassette in ICP8. ONCR-2169 has a miR-T3012 in ICP27 and a miR-T3096 cassette in UL8 but is otherwise identical to ONCR-2149. Vero cell monolayers were infected with the viruses at a multiplicity of infection of 0.03, then incubated for 3 days to allow for virus outgrowth. The cells were harvested and then lysed through three rapid freeze-thaw cycles to release the virus. Lysates were analyzed for virus yield by plaque assay of serial dilutions on Vero cell monolayers. The result shows that both viruses had similar yield in the absence of corresponding microRNA mimics (FIG. 7B).

[0832] In vivo Characterization of miR-TS Attenuated HSV: ten-week old female BALB/c mice were injected intra-cranially with 2 ul of the indicated viruses (ONCR-2149 or ONCR-2169), then monitored daily for signs of neurotoxicity and changes in their overall body weight. As shown FIG. 7C, no statistically significant difference was detected between any treatment groups, demonstrating that the miR-TS cassettes protect normal cells in the brain from the toxicity of the corresponding HSV constructs. According to prior reports, the lethal dosage of the HSV MacIntyre strain was about 20 PFU in some mouse strains. Therefore, the results here suggest that these engineered HSV comprising miR-TS cassettes can be administered at a dose that is at least 5 orders of magnitude higher that the original HSV strain. It is also worth noting that astrocytes and oligodendrocytes in mice are more resistant to HSV then those in human, and therefore additional safety margin can be beneficial for an oncolytic HSV that will be used for treating human subjects. Accordingly, even higher doses (e.g., 5e⁶ PFU) of the ONCR-2149 and ONCR-2169 viruses will be used to test the additional protection offered by the inclusion of the miR-TS cassettes in ICP27 and UL8 of ONCR-2169.

### Example 5—Engineering of Retargeted HSV

[0833] Two HSV constructs were engineered to retarget the HSV for alternative cell receptors, as shown in FIG. 8. Virus backbones were based on ONCR-2169, the cloned derivative of the HSV MacIntyre strain comprising miR-TS cassettes in ICP4, ICP8, IP27, and UL8, as well as the indicated mutations in UL23, UL30, UL37, and gB. As indicated on the right side of the figure, retargeting mutations were incorporated into the US6/gD gene by replacing the coding region for amino acid residues 6-24 of gD, the HVEM and 3-O-S-Heparan Sulfate binding domain, with a sequence encoding either i) a Knottin peptide that binds integrins (KPI); or ii) a VHH nanobody that binds the extracellular domain of EGFR (VE).

[0834] The engineered retargeting HSVs were tested for their growth properties in different Vero cells: regular Vero cells, and Vero cells with Nectin-1 knockout (KO). Cell monolayers were infected with the indicated viruses at a multiplicity of infection of 1.0. After incubation for 48 hours the monolayers were fixed and stained with crystal violet to visualize plaques associated with virus growth. As shown in FIG. 9A, the ONCR-2181-KPI mutant lost its infectivity for Vero-Nectin-1 knockout cells just like the parental HSV, whereas the ONCR-2181-VE mutant retained the infectivity even in Vero-Nectin-1 knockout cells. In another proliferation assay, Vero and Vero-Nectin-1 knockout cell monolayers were infected with the indicated viruses at a multiplicity of infection of 0.1. Growth of the viruses was assayed by quantifying mCherry reporter gene expression over the course of ˜48 hours using an automated inverted microscope (IncuCyte S3, Sartorius Inc). As shown in FIG. 9B, both gD-KPI and gD-VE mutations conferred improved growth kinetics on Vero cells, but only the gD-VE mutant facilitated growth on the Vero-Nectin-1 knockout cell line. Therefore, the gD-VE mutant gained the ability to infect and grow in cells with no Nectin-1 expression.

[0835] The engineered retargeting HSVs were then analyzed for their growth properties in glioblastoma cell lines. Monolayers of the indicated glioblastoma cancer cell lines were infected with the indicated viruses at a multiplicity of infection of 0.1. Growth of the viruses was assayed by quantifying mCherry reporter gene expression over the course of ˜48 hours using an automated inverted microscope (IncuCyte S3, Sartorius Inc). As shown in FIG. 10, the gD-KPI and gD-VE mutations conferred improved growth kinetics in most of the assayed cell lines.

[0836] The expressions of Nectin-1 and epidermal growth factor receptor (EGFR) in primary human glioblastoma (GBM) tumors were analyzed by microarray. As shown in Table 9 below, the prevalence of GBM cores with high Nectin-1 expression is much lower than that of GBM cores with high EGFR expression. Representative Nectin-1+GBM Cores are shown in FIG. 11. Based on the expression data, the EGFR-retargeted HSV will be more applicable to a wilder range of GBM tumors.

TABLE 9
Expression of Nectin-1 and EGFR in Glioblastoma Samples

| | No. of | | | Average H- |
|---|---|---|---|---|
| | core | Prevalence- | Average | score** of |
| | tumors | % of cores | % of tumor | Biomarker⁺ |
| Biomarker | (N)* | Biomarker+ ≥1% | cells | cores (0-300) |
| Nectin-1 | 41 | 2.4% | 23% | 39.6 |
| EGFR | 41 | 85% | 62% | 161 |

*primary GBM IV, including 1 IDHmut, 5 recurrent GBM
**H-score is a measure of expression intensity (1+, 2+, 3+) and % tumor area = 1 × (% cells 1+) + 2 × (% cells 2+) + 3 × (% cells 3+)

### Example 6—Improving Replication Fidelity and Acyclovir Sensitivity of the HSV

[0837] The L774F mutation was introduced into the UL30 gene of ONCR-1010 viral construct to generate ONCR-1012 viral construct (FIG. 12). Both viruses expressed the GFP reporter gene from UL44/gC promoter and the mCherry and FLuc reporter genes from the CMV promoter in the payload cassette. ONCR-1010 (UL30-WT) and ONCR-1012 (UL30-L774F) viruses were triple plaque purified, then serially propagated on Vero cells every 3-5 days. Viral DNA was purified at passage number 1, 5, 10, 15, and 20 for analysis by next gen sequencing (NGS). Sequencing data was analyzed by removing all variants that had <1000 total reads at that position and that occurred at <1% in the data set, and then removing all variant calls that were already present at passage number 1.

[0838] As shown in FIG. 13, the UL30-L774F mutation significantly reduced the mutation frequency of the virus, from 1.63 mutation/passage on average in the ONCR-1010 control to 0.56 mutation/passage on average in the ONCR-1012 construct. In the ONCR-1010 group, 23 of the 37 mutations were in the coding regions; in the ONCR-1012 group, 9 of the 16 mutations were in the coding regions. And, as shown in FIG. 14A and FIG. 14B, the UL30-L774F mutation had little effect on virus production.

[0839] The UL30-L774F mutation, however, lowered acyclovir sensitivity of the HSV construct and thus might compromise its treatment efficacy. Acyclovir can be used as a prodrug in HSV-TK mediated suicide gene therapy of cancer, which requires its phosphorylation by HSV thymidine kinase (TK). Virus sensitivity to acyclovir was assayed by adding increasing concentrations of the drug to intact Vero cell monolayers and then infecting with a standard dose of virus. The Vero cell monolayers were incubated for 4 days to allow for virus growth, and then the virus was harvested and the corresponding lysates assayed for virus by plaque assay. The IC90 was calculated as the amount of acyclovir that produced a 90% reduction in plaque titer compared to the untreated control. As shown in FIG. 15A, when introduced into ONCR-1010, the UL30-L774F mutation increased the IC90 of acyclovir from 0.43 ug/ml to 1.84 ug/ml, indicating lower acyclovir sensitivity. Because the bioavailability of acyclovir, when dosed orally, was about 1.76 ug/ml in the CNS, the efficacy of acyclovir may be significantly reduced in cells infected with HSV comprising the UL30-L774F mutation. This issue may be more prominent in an HSV strain that is intrinsically less sensitive to acyclovir, such as the HSV-Macintyre strain. As shown in FIG. 15B, when introduced into ONCR-2107 derived from HSV-MacIntyre, the UL30-L774F mutation rendered acyclovir resistance to the resultant ONCR-2123 construct.

[0840] To improve the acyclovir sensitivity of HSV variants carrying the UL30-L774F mutation, additional mutations were introduced into the UL23 viral gene encoding HSV thymidine kinase (HSV-TK) of ONCR-02123, resulting in the amino acid substitutions corresponding to L159I, 1160F, F161L, A168F and L169M of SEQ ID NO: 918. As shown in FIG. 16, these UL23 mutations restored acyclovir sensitivity of the HSV-MacIntyre derived ONCR-2140 virus carrying the UL30-L774F mutation. These HSV-TK mutations did not significantly affect virus production, as shown in FIG. 17A and FIG. 17B. Thus, combining the UL30-L774F and these UL23 mutations results in improved replication fidelity without compromising the acyclovir sensitivity.

### Example 7—Improving the Titer of HSV Syncytial Mutants During Virus Production

[0841] HSV syncytial mutations improve oncolysis and virus spread in tumor cells and enhance immunogenicity through releasing immunostimulatory DAMPs. However, these syncytial mutations often lower the viral titer during virus production, thus hampering their clinical applications.

[0842] Accordingly, to improve the yield of the HSV syncytial mutants during virus production (e.g., in Vero cells), an expression system was established to allow co-expression of non-syncytial version and syncytial mutant of either gB or gK protein, which facilitated the generation of viral envelopes that contained a greater proportion of gB or gK in an active conformation.

[0843] FIG. 18A-18C show multiple viral vector designs that allowed co-expression of both non-syncytial and syncytial variants of either gB or gK during virus production. The viral vector design in FIG. 18A allowed co-expression of wildtype gK from its endogenous locus and a mammalian codon optimized syncytial gK-L118Q mutant from a cDNA expression cassette. Other pairs generated in this configuration included “endogenous wildtype gK+mammalian codon optimized syncytial gK-1307N mutant in the cDNA cassette” and “endogenous non-syncytial gB+mammalian codon optimized syncytial gB-d877c mutant in the cDNA cassette.” (Here, the syncytial gB-d877c mutation refers to a gB protein comprising the deletion of all the C-terminal residues starting from amino acid T877.) On the other hand, the viral vector design in FIG. 18B allowed co-expression of a syncytial gB-d877c mutant from its endogenous locus in the virus genome and a mammalian codon-optimized gB from a cDNA expression cassette. Other pairs generated in this configuration include “syncytial gB-R858H mutant in the endogenous locus+mammalian codon optimized non-syncytial gB in the cDNA cassette.” In all these designs, the encoded gB protein comprised D285N and A549T mutations, regardless of whether the gB protein comprised the additional syncytial mutation (R858H or d877c). The ONCR-142 HSV backbone was used to evaluate the performance of all these viral vector designs. FIG. 18C shows the relative locations of the endogenous gB and gK loci as well as the cDNA cassette, which is inserted in the UL3-UL4 intergenic locus.

[0844] To test the production yield of each HSV construct, Vero cells were inoculated with the indicated viruses at a multiplicity of infection of 0.03 then incubated for 5 days to allow for virus outgrowth. The cells were harvested and then lysed through 3 rapid freeze-thaw cycles to release the virus. Lysates were analyzed for virus yield and syncytia formation by plaque assay of serial dilutions on Vero cell monolayers. As shown in FIG. 18D, simultaneous expression of both wild-type and syncytial mutants during virus growth increased the production yield of multiple vectors, including ONCR-283, ONCR-285 and ONCR-287. In comparison, HSV comprising either gB-d877c or gK-L118Q syncytial mutation without the corresponding non-syncytial copy of gB or gK had much lower virus yield (data not shown). And, other than ONCR-285, the other four HSV constructs all displayed syncytial phenotype.

[0845] To further improve virus production yield, a miRNA target sequences cassette (miR-TS cassette) was inserted into the gene loci encoding the gB or gK syncytial mutant to regulate the expression of the gB or gK syncytial mutant during virus production. The miR-TS cassette comprised target sequences for three miRNAs (miR-34c-5p, miR-299-5p, and miR-582-5p), which are highly expressed in the Vero production cell line but not in tumor cells. These three microRNAs were identified by direct quantification of RNA sample preparations of Vero cells using a fluorescent hybridization assay (nCounter miRNA Expression kit, NanoString Inc). As a result, the expression of the non-syncytial gB or gK was favored in Vero production cells but the expression of the syncytial mutant was favored in tumor cells.

[0846] As shown in FIG. 19A, this miR-TS cassette, termed miR-T2310, consisted of 4 copies of each miRNA target sequence separated by a 4 bp spacer (SEQ ID NO: 930). The corresponding miRNA target sequences (SEQ ID NO: 927-929) are the reverse complement of miR-34c-5p (SEQ ID NO: 924), miR-299-5p (SEQ ID NO: 925), and miR-582-5p (SEQ ID NO: 926), respectively. As shown in FIG. 19B and FIG. 19C, the miR-T2310 cassette was inserted in the 3′UTR of the gene locus encoding the gK or gB syntytial mutant, located either at the cDNA cassette or the endogenous HSV locus. In the configuration of FIG. 19B, the HSV comprised unmodified gK at its endogenous locus and a miR-T2310 attenuated, mammalian codon optimized syncytial gK-1307N mutant in a cDNA expression cassette. Other gK mutants generated in this configuration included mammalian codon optimized gK-1307N with no miR-T2310 attenuation, mammalian codon optimized gK-A40V with or without miR-T2310 attenuation, and mammalian codon optimized gK-L118Q with or without miR-T2310 attenuation. In the configuration of FIG. 19C, the HSV comprised a miR-T2310 attenuated syncytial gB-d877c mutant at its endogenous locus and a mammalian codon-optimized non-syncytial gB in a cDNA expression cassette. Similarly, another HSV construct comprising syncytial gB-d877c mutant at its endogenous locus but without the miR-T2310 attenuation was also generated in this configuration.

[0847] The HSV backbones used in the miR-TS cassette studies were ONCR-2112 and ONCR-2008, which differed by the cDNA cassette location and the loxP location but were otherwise identical (FIG. 19D). The ONCR-2112 HSV backbone was used to evaluate the performance of the gB syncytial mutant constructs, whereas the ONCR-2008 HSV backbone was used to evaluate the performance of the gK syncytial mutant constructs.

[0848] To test the production yield of each HSV construct, Vero cells were inoculated with the indicated viruses at a multiplicity of infection of 0.03, then incubated for 5 days to allow for virus outgrowth. The cells were harvested and then lysed through 3 rapid freeze-thaw cycles to release the virus. Lysates were analyzed for virus yield and syncytia formation by plaque assay of serial dilutions on Vero cell monolayers. As shown in FIG. 19E, for all of the HSV constructs tested, miR-T attenuation of syncytial mutants during virus growth significantly increased virus production yield and they all displayed syncytial phenotype

### Example 8—Codon Optimization of Transgene

[0849] Experiments were conducted to test the effect of G/C content on the protein expression level of codon optimized transgenes in the HSV constructs. Several ORFs encoding mouse IL-12 (mIL12) and anti-PD1 antibody were tested. These ORFs have different G/C contents ranging from 52% to 64%:
[0850] SEQ ID NO: 931: G/C content: 64%;
[0851] SEQ ID NO: 932: G/C content: 63%;
[0852] SEQ ID NO: 933: G/C content: 60%;
[0853] SEQ ID NO: 934: G/C content: 52%;
[0854] SEQ ID NO: 935: G/C content: 52% (T2A);

[0855] In these ORFs, the coding sequences for mIL12 and anti-PD1 antibody were separated by a furin-T2A cleavage peptide coding sequence and the two subunits of mIL12 were linked by a 15-mer GS linker peptide, except the 52% GC (T2A) construct (SEQ ID NO: 935) in which the two subunits of mIL12 were linked by a furin-T2A cleavage peptide.

[0856] Each of the ORFs was cloned into the HSV viral construct at the UL50-UL51 intergenic region and tested for protein expression. As shown in FIG. 20, higher G/C content in the transgene ORF enhanced payload expression: the protein expression levels of IL-12 and anti-PD1 antibody were increased by more than 10-fold by switching from ˜52% G/C content in the mammalian codon-optimized version to ˜63% G/C content in the A. dehalogenans codon-optimized version. Similar correlations of higher G/C content and increased protein expression level were also observed in codon optimized ORFs encoding two reporter proteins. Thus, higher ORF G/C content (e.g., those optimized based on the codon usage of A. dehalogenans) increases the expression level of the transgene(s) in the HSV construct.

### Example 9—Oncolytic HSV Viruses with Payloads for Treating Glioblastoma

[0857] In vivo experiments were conducted to test the efficacy of the HSV oncolytic virus encoding different payload molecules against glioblastoma. Two orthotopic mouse models were used. One orthotopic model used CT2A cells modified to express FLuc which enables imaging post-implantation. The other orthotopic model used GL261 cells modified to express mNectin1, which enabled HSV infection, and also to express FLuc which enabled imaging post-implantation. Cells were implanted intracranially in 12-week-old C57B16 mice by stereotactic injection, and one week later the tumors were injected with the indicated viruses. A brief description of the protocols for implantation is provided in Takenaka et al. Nat Neurosci 22, 729-740 (2019).

[0858] HSV oncolytic viruses encoding the payload molecule(s) were constructed by inserting the payload expression cassette into the UL3-UL4 intergenic region, and inserting the BAC sequences into the UL37-UL38 intergenic region. The virus backbone (control virus) is ONCR-142, which was a cloned derivative of the HSV KOS strain that (i) had miR-T attenuation cassettes in ICP4, ICP27, and ICP34.5, (ii) had the entire internal repeat region deleted (DJoint), and (iii) comprised the indicated mutations in US12, gB, and gC. The control virus contained only the BAC sequences but not the payload sequence. See FIG. 21A. The payload molecule(s) in various HSV constructs are shown in FIG. 21B. In the first set of experiments, viruses encoding mouse IL-12 (mIL-12) and/or anti-PD-1 antibody and the control virus were each injected intratumorally at the indicated time and dosage according to FIG. 22A and FIG. 22B. The results show that the HSV oncolytic virus expressing both mIL12 and the anti-PD1 antibody displayed synergistic effect at prolonging the survival of the animal models, compared to either payload alone. The HSV oncolytic virus expressing mIL12 also significantly prolonged the survival of the animals although it was less effective than the virus expressing both mIL12 and the anti-PD1 antibody. As shown in FIG. 22C, the the animals were also protected from tumor cell re-challenge study in the GL261 model. FIG. 22D shows the percentage of various immune cells in the CT2A model. And FIG. 22E shows that ONCR-GBM with both mIL12 and anti-PD1 payloads stimulated CD8 T cells recruitment and activation.

[0859] Additional experiments were then conducted to analyze the dose-response relationship of the HSV oncolytic virus expressing both mIL12 and anti-PD1 antibody (ONCR-278) in the GL261 orthotopic mouse model. As shown in FIG. 23, the results demonstrated clear dose response for the HSV oncolytic virus expressing both mIL12 and anti-PD1 antibody. Higher doses were more efficacies than lower doses. And the intermediate, suboptimal dose of 1×10⁶ pfu was selected for use in combination screens by co-dosing with viruses encoding alternative payloads (e.g., antibodies, cytokines, and/or enzymes) based on their potential to modulate the immune-suppressive tumor microenvironment of GBM. The combination of payloads could then be incorporated into the same HSV oncolytic virus.

[0860] For the combination screens, GL261-luc-N1 cells were intracranially implanted in 12-week-old C57B16 mice, then 1 week later the tumors were injected with the combination of viruses encoding various candidate payloads. The results are shown in FIGS. 24A-24J. Each of the anti-TREM2-DLE, PGDH, and CTX-mBiTE payloads were identified as providing improved efficacy when co-expressed with the mIL12 and anti-PD1 payload.

[0861] The efficacy of payload combinations was also tested in the ONCR-2183 HSV backbone (FIG. 25A), which is a cloned derivative of the HSV MacIntyre strain containing:
[0862] miR-T attenuation cassettes miR-T 3060 (SEQ ID NO: 858), miR-T 9919 (SEQ ID NO: 859), miR-T 3012 (SEQ ID NO: 873), and miR-T 3096 (SEQ ID NO: 874) in ICP4 (both loci), ICP8, ICP27, and UL8, respectively;
[0863] UL23 encoding a thymidine kinase comprising L159I, 1160F, F161L, A168F and L169M combo mutations;
[0864] UL27 encoding a glycoprotein B (gB) comprising D285N/A549T mutations;
[0865] UL30 encoding a DNA polymerase catalytic subunit (DPCS) comprising L774F mutation;
[0866] UL37 encoding a tegument protein comprising the “R2” combo mutations (Q403A/E452A/Q455A/Q511A/R515A).
[0867] US6 encoding a mutant gD with the native amino acid residues 6-24 of SEQ ID NO: 921 replaced with a knottin peptide that binds to integrins (SEQ ID NO: 922);
[0868] the loxP-BAC replicon located in the UL40-UL41 intergenic region; and
[0869] a cDNA expression cassette located in the UL50-UL51 intergenic region.

[0870] The HSV construct further contains syncytial mutations in the viral genes encoding gH and UL24. Exemplary cDNA expression cassettes are provided in FIG. 25B, each of which can be inserted into the UL50-UL51 intergenic locus of ONCR-2183 to create a recombinant HSV for expressing the corresponding payloads combination of i) IL-12, anti-PD1, PGDH, and anti-TREM2 (ONCR-2205); or ii) IL-12, anti-PD1, PGDH, CTX-BITE, and anti-TREM2 (ONCR-2206). Each of these HSV constructs were tested for tumor inhibition efficacy using the GL261 and CT2A Model Systems. GL261-luc-N1 or CT2A-luc-N1 cells were intracranially implanted in 12-week-old C57B16 mice, then 1 week later the tumors were injected with the indicated viruses. As shown in FIG. 25C, the payload combination in either ONCR-2205 or ONCR-2206 provides superior tumor inhibition efficacy compared to the no payload control ONCR-2183 in GL261 and CT2A models.

[0871] Based on the examples above, an HSV backbone derived from the HSV MacIntyre strain, ONCR-2204, was constructed to incorporate various design features (FIG. 26A), including:
[0872] miR-T attenuation cassettes miR-T 3060 (SEQ ID NO: 858), miR-T 9919 (SEQ ID NO: 859), miR-T 3012 (SEQ ID NO: 873), and miR-T 3096 (SEQ ID NO: 874) in ICP4 (both loci), ICP8, ICP27, and UL8, respectively;
[0873] UL23 encoding a thymidine kinase comprising L159I, I160F, F161L, A168F and L169M combo mutations;
[0874] UL27 encoding a glycoprotein B (gB) comprising D285N/A549T mutations;
[0875] UL30 encoding a DNA polymerase catalytic subunit (DPCS) comprising L774F mutation;
[0876] UL37 encoding a tegument protein comprising the “R2” combo mutations (Q403A/E452A/Q455A/Q511A/R515A).
[0877] US6 encoding a mutant gD with the native amino acid residues 6-24 of SEQ ID NO: 921 replaced with a VHH nanobody that binds the extracellular domain of EGFR (SEQ ID NO: 923);
[0878] the loxP-BAC replicon located in the UL40-UL41 intergenic region; and
[0879] a cDNA expression cassette located in the UL50-UL51 intergenic region.

[0880] The HSV construct further contains syncytial mutations in the viral genes encoding gH and UL24. Exemplary cDNA expression cassettes are provided in FIG. 26B, each of which can be inserted into the UL50-UL51 intergenic locus of ONCR-2204 to create a recombinant HSV for expressing the corresponding payloads combination of i) IL-12, anti-PD1, PGDH, and anti-TREM2 (ONCR-2218); ii) IL-12, anti-PD1, PGDH, CTX-BITE, and anti-TREM2 (ONCR-2219); or iii) IL-12, anti-PD1, CTX-BiTE, and anti-TREM2 (ONCR-2233). Each of these HSV constructs are tested for tumor inhibition efficacy using the GL261-luc-N1 and CT2A-luc-N1 intracranial syngeneic GBM Model Systems. GL261-luc-N1 or CT2A-luc-N1 cells are intracranially implanted in 12-week-old C57B16 mice, then about 7 days later the tumors are injected with the indicated viruses, and the survival benefit of these HSV constructs is compared, similar to the analysis performed for the ONCR-2183 backbone based HSV constructs.

[0881] While preferred embodiments of the present disclosure are shown and described herein, it will be obvious to those skilled in the art that such embodiments are provided by way of example only. Numerous variations, changes, and substitutions can be implemented by those skilled in the art without departing from the disclosure. It should be understood that various alternatives to the embodiments of the disclosure described herein may be employed in practicing the disclosure. It is intended that the following claims define the scope of the disclosure and that methods and structures within the scope of these claims and their equivalents be covered thereby.

### INCORPORATION BY REFERENCE

[0882] All references, articles, publications, patents, patent publications, and patent applications cited herein are incorporated by reference in their entireties for all purposes. However, mention of any reference, article, publication, patent, patent publication, and patent application cited herein is not, and should not, be taken as an acknowledgment or any form of suggestion that they constitute valid prior art or form part of the common general knowledge in any country in the world.

TABLE 10
Summary of relationships between 12 select oncomiRs (9 tumor
suppressors and 3 oncogenic miRNAs) and various cancers

| | Down-regulated | | | | | | | | | Up-regulated | | |
|---|---|---|---|---|---|---|---|---|---|---|---|---|
| | | miR- | miR- | miR- | miR- | miR- | miR- | miR- | miR- | miR- | miR- | miR- |
| Malignancy | let-7 | 15a | 16 | 29a | 34a | 98 | 101 | 124 | 202 | 17 | 21 | 155 |
| acute lymphoblastic leukemia | X | | | | | | | X | | | | |
| acute myeloid leukemia | X | | | X | | | | | | X | | X |
| acute promyelocytic leukemia | X | | | | | | | | | | | |
| adrenal cortical carcinoma | | | | | | | | | | | X | |
| anaplastic astrocytoma | | | | | | | | X | | | | |
| anaplastic large-cell lymphoma | | | | | | | | | | | | X |
| astrocytoma | | | | | | | | X | | | | |
| B cell lymphoma | | | | | X | | | | | X | | |
| bladder cancer | | | X | | X | | X | X | | X | | X |
| breast cancer | X | X | X | X | X | X | | X | | X | | X |
| breast carcinoma | | | | | | | | | | X | | |
| bronchioloalveolar carcinoma | X | | | | | X | | | | | | |
| cervical cancer | | | | | | | | X | | X | | X |
| cervical carcinoma | | X | X | | X | | X | | | | | |
| cervical squamous cell | | | | X | | | | X | | | | |
| carcinoma | | | | | | | | | | | | |
| cholangiocarcinoma | | | | | X | | X | | | X | | |
| chondrosarcoma | X | | | | | | | | | | | |
| chordoma | | | | | X | | | | | | | |
| choriocarcinoma | | | | | X | | | | | | | |
| chronic lymphocytic leukemia | | X | X | | | | | | | | | X |
| chronic myelogenous leukemia | | | X | | | | | | | | | X |
| clear cell renal cell cancer | | | | | X | | | | | | | X |
| colon cancer | X | | | | X | X | X | | | | | X |
| colorectal cancer | X | X | X | X | X | | X | X | X | X | | X |
| colorectal carcinoma | | | | | | | | | | X | | X |
| cutaneous T cell lymphoma | | | | | | | | | | | | X |
| diffuse large B cell lymphoma | | | | | | | | | | | | X |
| endometrial cancer | | | | | X | | X | | | | | X |
| epithelial ovarian cancer | | | | | | | | X | | | | |
| esophageal cancer | | X | | | | | X | X | | | | |
| esophageal squamous cell | X | | X | | X | X | X | | | X | | |
| carcinoma | | | | | | | | | | | | |
| extrahepatic cholangiocarcinoma | | | | | X | | | | | | | |
| follicular lymphoma | | | | | | | | | X | | | |
| gallbladder carcinoma | | | | | | | | | | | | X |
| gastric cancer | X | | | X | X | X | X | X | X | X | | X |
| glioblastoma | X | | | | X | | X | X | | | | |
| glioma | X | | X | | X | X | | X | | X | | X |
| head and neck cancer | | | | | | | | | | | | |
| head and neck squamous cell | X | | X | X | X | | | | | | X | |
| carcinoma | | | | | | | | | | | | |
| hepatocellular carcinoma | X | | X | X | X | X | X | X | X | X | X | X |
| hypopharyngeal squamous | | | | | | | | | | | X | |
| cell carcinoma | | | | | | | | | | | | |
| kidney cancer | | | | | | | | | | | X | |
| laryngeal carcinoma | | | X | | | | | | | | X | |
| laryngeal squamous cell | | | | | | | X | | | | X | |
| carcinoma | | | | | | | | | | | | |
| liver cancer | | | | | | | X | | | | X | X |
| lung adenocarcinoma | | | X | | | | | | | | | X |
| lung cancer | X | X | X | | X | X | X | | | X | X | X |
| malignant melanoma | X | | | | X | X | X | | | X | X | X |
| malt lymphoma | | | | | | | | | | | | X |
| mantle cell lymphoma | | | | X | | | | X | | X | | X |
| medulloblastoma | | | | | | | | X | | X | | |
| mesenchymal cancer | | | | X | | | | | | | | |
| monocytic leukemia | | | | X | | | | | | | | |
| multiple myeloma | | | | | | | | | | | X | |
| nasopharyngeal cancer | | | | | | | | | | X | | |
| nasopharyngeal carcinoma | X | | | | | X | X | X | | | X | X |
| neuroblastoma | X | X | X | X | X | X | | X | | | | |
| non-small cell lung cancer | X | X | X | X | X | | X | X | | X | X | X |
| oral cancer | X | | | | X | | | | | | X | |
| oral squamous cell carcinoma | | | | X | | | | X | | | X | X |
| osteosarcoma | X | X | X | | X | | X | X | X | X | X | |
| ovarian cancer | X | | | | X | X | | X | | | X | X |
| ovarian carcinoma | | | | | | | X | | | | | |
| pancreatic adenocarcinoma | | | | | X | | | | | | X | |
| pancreatic cancer | | X | | | | | X | X | | X | X | |
| pancreatic ductal | X | X | X | | X | X | | | | | X | |
| adenocarcinoma | | | | | | | | | | | | |
| papillary thyroid carcinoma | X | | X | | X | | X | | | | X | X |
| pituitary carcinoma | | | | | | | | | | X | | |
| prostate cancer | X | X | X | | X | | X | X | | | X | |
| rectal cancer | | | | | X | | | | | | X | X |
| renal cell carcinoma | X | | X | | X | | | | | | X | |
| renal clear cell carcinoma | X | | | | | | | | | | | X |
| retinoblastoma | | | | | X | | X | | | | X | |
| squamous carcinoma | | X | X | | X | | | | | | X | X |
| T cell lymphoblastic lymphoma | | | | | | | | | | X | | |
| uveal melanoma | | | | | X | | | | | | | |

TABLE 11
Summary of miRNA expression in cancer

| Malignancy | Down-regulated miRs | Up-regulated miRs |
|---|---|---|
| breast cancer | let-7a, let-7a-1, let-7a-2, let-7a-3, let-7b, | mir-10b, mir-125a, mir-135a, |
| | let-7c, let-7d, let-7e, let-7f-1, let-7f-2, | mir-140, mir-141, mir-142, mir- |
| | let-7g, let-7i, mir-100, mir-107, mir-10a, | 150, mir-155, mir-181a, mir- |
| | mir-10b, mir-122, mir-124, mir-1258, | 181b, mir-182, mir-18a, mir-18b, |
| | mir-125a-5p, mir-125b, mir-126, mir- | mir-191, mir-196a, mir-197, mir- |
| | 127, mir-129, mir-130a, mir-132, mir- | 19a, mir-19b, mir-200a, mir- |
| | 133a, mir-143, mir-145, mir-146a, mir- | 200b, mir-200c, mir-203, mir- |
| | 146b, mir-147, mir-148a, mir-149, mir- | 205, mir-20a, mir-20b, mir-21, |
| | 152, mir-153, mir-15a, mir-16, mir-17- | mir-217, mir-221, mir-224, mir- |
| | 5p, mir-181a, mir-1826, mir-183, mir- | 23a, mir-24, mir-24-2-5p, mir-24- |
| | 185, mir-191, mir-193a-3p, mir-193b, | 3p, mir-27a, mir-29a, mir-29b-1, |
| | mir-195, mir-199b-5p, mir-19a-3p, mir- | mir-29b-2, mir-29c, mir-373, |
| | 200a, mir-200b, mir-200c, mir-205, mir- | mir-378, mir-423, mir-429, mir- |
| | 206, mir-211, mir-216b, mir-218, mir-22, | 495, mir-503, mir-510, mir-520c, |
| | mir-26a, mir-26b, mir-300, mir-30a, mir- | mir-526b, mir-96 |
| | 31, mir-335, mir-339-5p, mir-33b, mir- | |
| | 34a, mir-34b, mir-34c, mir-374a, mir- | |
| | 379, mir-381, mir-383, mir-425, mir-429, | |
| | mir-450b-3p, mir-494, mir-495, mir-497, | |
| | mir-502-5p, mir-517a, mir-574-3p, mir- | |
| | 638, mir-7, mir-720, mir-7515, mir-92a, | |
| | mir-98, mir-99a, mmu-mir-290-3p, | |
| | mmu-mir-290-5p | |
| chondrosarcoma | let-7a, mir-100, mir-136, mir-145, mir- | |
| | 199a, mir-222, mir-30a, mir-335, mir- | |
| | 376a | |
| colorectal cancer | let-7a, mir-1, mir-100, mir-101, mir-124, | let-7a, mir-103, mir-106a, mir- |
| | mir-125a, mir-126, mir-129, mir-1295b- | 10b, mir-1179, mir-1229, mir- |
| | 3p, mir-1307, mir-130b, mir-132, mir- | 1246, mir-125b-2*, mir-1269a, |
| | 133a, mir-133b, mir-137, mir-138, mir- | mir-130b, mir-133b, mir-135a, |
| | 139, mir-139-5p, mir-140-5p, mir-143, | mir-135a-1, mir-135a-2, mir- |
| | mir-145, mir-148a, mir-148b, mir-149, | 135b, mir-139-3p, mir-145, mir- |
| | mir-150-5p, mir-154, mir-15a, mir-15b, | 150, mir-150*, mir-155, mir-17, |
| | mir-16, mir-18a, mir-191, mir-192, mir- | mir-181a, mir-182, mir-183, mir- |
| | 193a-5p, mir-194, mir-195, mir-196a, | 18a, mir-191, mir-196a, mir- |
| | mir-198, mir-199a-5p, mir-200c, mir- | 196b, mir-19a, mir-19b, mir- |
| | 203, mir-204-5p, mir-206, mir-212, mir- | 200b, mir-200c, mir-203, mir- |
| | 215, mir-218, mir-22, mir-224, mir-24- | 204-5p, mir-20a, mir-20a-5p, |
| | 3p, mir-26b, mir-27a, mir-28-3p, mir-28- | mir-21, mir-210, mir-211, mir- |
| | 5p, mir-29b, mir-30a-3p, mir-30b, mir- | 221, mir-223, mir-224, mir-23a, |
| | 320a, mir-328, mir-338-3p, mir-342, mir- | mir-25, mir-27a, mir-29a, mir- |
| | 345, mir-34a, mir-34a-5p, mir-361-5p, | 301a, mir-31, mir-32, mir-320b, |
| | mir-375, mir-378, mir-378a-3p, mir- | mir-326, mir-424, mir-429, mir- |
| | 378a-5p, mir-409-3p, mir-422a, mir- | 494, mir-497, mir-499-5p, mir- |
| | 4487, mir-483, mir-497, mir-498, mir- | 592, mir-630, mir-7-5p, mir- |
| | 518a-3p, mir-551a, mir-574-5p, mir-625, | 892a, mir-92, mir-92a, mir-93, |
| | mir-638, mir-7, mir-96-5p | mir-95, mir-96 |
| esophageal squamous | let-7a, let-7a-1, let-7a-2, let-7a-3, let-7b, | mir-100, mir-1179, mir-1290, |
| cell carcinoma | let-7c, let-7d, let-7e, let-7f-1, let-7f-2, | mir-130b, mir-145, mir-16, mir- |
| | let-7g, let-7i, mir-1, mir-100, mir-101, | 17, mir-183, mir-18a, mir-19a, |
| | mir-126, mir-1294, mir-133a, mir-133b, | mir-19b, mir-208, mir-20a, mir- |
| | mir-138, mir-143, mir-145, mir-150, mir- | 21, mir-218, mir-223, mir-25, |
| | 185, mir-195, mir-200b, mir-203, mir-21, | mir-30a-5p, mir-31, mir-330-3p, |
| | mir-210, mir-214, mir-218, mir-22, mir- | mir-373, mir-9, mir-92a, mir-942 |
| | 27a, mir-29b, mir-29c, mir-302b, mir- | |
| | 34a, mir-375, mir-494, mir-518b, mir- | |
| | 655, mir-98, mir-99a | |
| gastric cancer | let-7a, let-7b, let-7g, mir-1, mir-101, mir- | mir-100, mir-103, mir-106a, mir- |
| | 103a, mir-10a, mir-10b, mir-1207-5p, | 106b, mir-107, mir-10a, mir-10b, |
| | mir-122, mir-1228*, mir-124, mir-124- | mir-1259, mir-125b, mir-126, |
| | 3p, mir-125a-3p, mir-126, mir-1266, mir- | mir-1274a, mir-1303, mir-130b*, |
| | 1271, mir-129-1-3p, mir-129-2-3p, mir- | mir-135a-5p, mir-135b, mir-138, |
| | 129-3p, mir-129-5p, mir-133a, mir-133b, | mir-143, mir-146a, mir-147, mir- |
| | mir-137, mir-141, mir-143, mir-144, mir- | 148a, mir-150, mir-17, mir-17- |
| | 145, mir-146a, mir-146a-5p, mir-148a, | 5p, mir-181a, mir-181a-2*, mir- |
| | mir-148b, mir-149, mir-152, mir-155, | 181a-5p, mir-181c, mir-183, mir- |
| | mir-155-5p, mir-181a, mir-181b, mir- | 185, mir-18a, mir-191, mir-192, |
| | 182, mir-183, mir-185, mir-194, mir-195, | mir-196a, mir-196a*, mir-196a- |
| | mir-197, mir-199a-3p, mir-200b, mir- | 5p, mir-196b, mir-199a, mir- |
| | 200c, mir-202-3p, mir-204, mir-204-5p, | 199a-3p, mir-199a-5p, mir-19a, |
| | mir-205, mir-206, mir-210, mir-212, mir- | mir-19b, mir-200b, mir-20a, mir- |
| | 217, mir-218, mir-22, mir-23b, mir-24, | 21, mir-214, mir-215, mir-221, |
| | mir-26a, mir-29a, mir-29a-3p, mir-29b, | mir-221*, mir-222, mir-223, mir- |
| | mir-29b-1, mir-29b-2, mir-29c, mir-30a- | 224, mir-23a, mir-23b, mir-27a, |
| | 5p, mir-30b, mir-31, mir-328, mir-329, | mir-27b, mir-296-5p, mir-301a, |
| | mir-331-3p, mir-335-5p, mir-338, mir- | mir-302f, mir-337-3p, mir-340*, |
| | 338-3p, mir-34a, mir-34b, mir-34c, mir- | mir-34a, mir-362-3p, mir-370, |
| | 361-5p, mir-367, mir-375, mir-378, mir- | mir-374a, mir-377, mir-421, mir- |
| | 409-3p, mir-410, mir-429, mir-433, mir- | 425, mir-500, mir-520c-3p, mir- |
| | 449, mir-449a, mir-490-3p, mir-494, mir- | 544, mir-575, mir-601, mir-616*, |
| | 497, mir-503, mir-506, mir-513b, mir- | mir-650, mir-92, mir-98, mir-99a |
| | 520d-3p, mir-542-3p, mir-622, mir-625, | |
| | mir-638, mir-663, mir-7, mir-765, mir-9 | |
| glioma | let-7a, let-7f, mir-106a, mir-107, mir- | mir-106b, mir-106b-5p, mir-10b, |
| | 122, mir-124, mir-124-5p, mir-124a, mir- | mir-125b, mir-132, mir-155, mir- |
| | 125b, mir-128, mir-136, mir-137, mir- | 17, mir-181a, mir-182, mir-183, |
| | 139, mir-143, mir-145, mir-146a, mir- | mir-193b, mir-19a, mir-19b, mir- |
| | 146b, mir-146b-5p, mir-152, mir-15b, | 20a, mir-210, mir-214, mir-221, |
| | mir-16, mir-181a, mir-181a-1, mir-181a- | mir-222, mir-224, mir-23a, mir- |
| | 2, mir-181b, mir-181b-1, mir-181b-2, | 24, mir-24-3p, mir-25, mir-26a, |
| | mir-181c, mir-181d, mir-184, mir-185, | mir-27a-3p, mir-27b, mir-30a-5p, |
| | mir-195, mir-199a-3p, mir-200a, mir- | mir-30e, mir-30e*, mir-328, mir- |
| | 200b, mir-203, mir-204, mir-205, mir- | 335, mir-33a, mir-372, mir-486, |
| | 218, mir-219-5p, mir-23b, mir-26b, mir- | mir-494, mir-497, mir-566, mir- |
| | 27a, mir-29c, mir-320, mir-326, mir-328, | 603, mir-650, mir-675, mir-9, |
| | mir-34a, mir-34c-3p, mir-34c-5p, mir- | mir-92b, mir-93, mir-96 |
| | 375, mir-383, mir-451, mir-452, mir- | |
| | 483-5p, mir-495, mir-584, mir-622, mir- | |
| | 656, mir-7, mir-98 | |
| nasopharyngeal | let-7a, let-7a-1, let-7a-2, let-7a-3, let-7b, | mir-10b, mir-144, mir-149, mir- |
| carcinoma | let-7c, let-7d, let-7e, let-7f-1, let-7f-2, | 155, mir-18a, mir-21, mir-214, |
| | let-7g, let-7i, mir-1, mir-101, mir-124, | mir-24, mir-421, mir-663, mir-7- |
| | mir-138, mir-143, mir-145, mir-148a, | 5p, mir-93 |
| | mir-200b, mir-204, mir-216b, mir-29c, | |
| | mir-320a, mir-324-3p, mir-34c, mir-375, | |
| | mir-378, mir-451, mir-506, mir-9, mir-98 | |
| non-small cell lung | let-7a, let-7c, mir-1, mir-100, mir-101, | mir-10b, mir-125a-5p, mir-1280, |
| cancer | mir-106a, mir-107, mir-124, mir-125a- | mir-136, mir-140, mir-141, mir- |
| | 3p, mir-125a-5p, mir-126*, mir-129, mir- | 142-3p, mir-145, mir-146a, mir- |
| | 133a, mir-137, mir-138, mir-140, mir- | 150, mir-18a, mir-196a, mir-19a, |
| | 143, mir-145, mir-146a, mir-146b, mir- | mir-200a, mir-200c, mir-205, |
| | 148a, mir-148b, mir-149, mir-152, mir- | mir-205-5p, mir-21, mir-212, |
| | 153, mir-154, mir-155, mir-15a, mir-16, | mir-22, mir-221, mir-222, mir- |
| | mir-17-5p, mir-181a-1, mir-181a-2, mir- | 24, mir-25, mir-29c, mir-31, mir- |
| | 181b, mir-181b-1, mir-181b-2, mir-181c, | 328, mir-330-3p, mir-339, mir- |
| | mir-181d, mir-184, mir-186, mir-193b, | 34a, mir-375, mir-494, mir-675- |
| | mir-195, mir-199a, mir-204, mir-212, | 5p, mir-9, mir-92b, mir-93, mir- |
| | mir-221, mir-224, mir-26b, mir-27a, mir- | 95 |
| | 27b, mir-29a, mir-29b, mir-29c, mir-30a, | |
| | mir-30b, mir-30c, mir-30d, mir-30d-5p, | |
| | mir-30e-5p, mir-32, mir-335, mir-338- | |
| | 3p, mir-340, mir-342-3p, mir-34a, mir- | |
| | 34b, mir-361-3p, mir-365, mir-373, mir- | |
| | 375, mir-429, mir-449a, mir-4500, mir- | |
| | 451, mir-4782-3p, mir-497, mir-503, | |
| | mir-512-3p, mir-520a-3p, mir-526b, mir- | |
| | 625*, mir-96, mir-99a | |
| osteosarcoma | let-7a, mir-1, mir-100, mir-101, mir-122, | mir-128, mir-151-3p, mir-17, |
| | mir-124, mir-125b, mir-126, mir-127-3p, | mir-181a, mir-181b, mir-181c, |
| | mir-132, mir-133a, mir-141, mir-142-3p, | mir-18a, mir-191, mir-195-5p, |
| | mir-142-5p, mir-143, mir-144, mir-145, | mir-199a-3p, mir-19a, mir-19b, |
| | mir-153, mir-16, mir-183, mir-194, mir- | mir-20a, mir-21, mir-210, mir- |
| | 195, mir-199a-3p, mir-204, mir-212, mir- | 214, mir-221, mir-27a, mir-300, |
| | 217, mir-218, mir-22, mir-23a, mir-24, | mir-320a, mir-374a-5p, mir-720, |
| | mir-26a, mir-26b, mir-29b, mir-32, mir- | mir-9, mir-92a |
| | 320, mir-335, mir-33b, mir-340, mir-34a, | |
| | mir-34b, mir-34c, mir-375, mir-376c, | |
| | mir-382, mir-3928, mir-424, mir-429, | |
| | mir-449a, mir-451, mir-454, mir-503, | |
| | mir-519d, mir-646 | |
| pancreatic ductal | let-7a, let-7a-1, let-7a-2, let-7a-3, let-7b, | mir-10b, mir-186, mir-18a, mir- |
| adenocarcinoma | let-7c, let-7d, let-7e, let-7f-1, let-7f-2, | 192, mir-194, mir-196a, mir-198, |
| | let-7g, let-7i, mir-126, mir-135a, mir- | mir-203, mir-21, mir-212, mir- |
| | 143, mir-144, mir-145, mir-148a, mir- | 30b-5p, mir-31, mir-34a, mir- |
| | 150, mir-15a, mir-16, mir-200a, mir- | 369-5p, mir-376a, mir-541 |
| | 200b, mir-200c, mir-217, mir-218, mir- | |
| | 337, mir-375, mir-494, mir-615-5p, mir- | |
| | 98 | |
| renal cell carcinoma | let-7a, let-7d, mir-1, mir-106a*, mir-126, | mir-100, mir-1233, mir-1260b, |
| | mir-1285, mir-129-3p, mir-1291, mir- | mir-146a, mir-146b, mir-16, mir- |
| | 133a, mir-133b, mir-135a, mir-138, mir- | 193a-3p, mir-203a, mir-21, mir- |
| | 141, mir-143, mir-145, mir-182-5p, mir- | 210, mir-27a, mir-362, mir-572, |
| | 199a-3p, mir-200a, mir-205, mir-218, | mir-7 |
| | mir-28-5p, mir-30a, mir-30c, mir-30d, | |
| | mir-34a, mir-378, mir-429, mir-509-3p, | |
| | mir-509-5p, mir-646 | |
| bronchioloalveolar | let-7a-1, let-7a-2, let-7a-3, let-7b, let-7c, | |
| carcinoma | let-7d, let-7e, let-7f-1, let-7f-2, let-7g, | |
| | let-7i, mir-98 | |
| colon cancer | let-7a-1, let-7a-2, let-7a-3, let-7b, let-7c, | mir-1290, mir-145, mir-155, mir- |
| | let-7d, let-7e, let-7f-1, let-7f-2, let-7g, | 181a, mir-18a, mir-200c, mir-31, |
| | let-7i, mir-100, mir-101, mir-126, mir- | mir-675 |
| | 142-3p, mir-143, mir-145, mir-192, mir- | |
| | 200c, mir-21, mir-214, mir-215, mir-25, | |
| | mir-302a, mir-320, mir-320a, mir-34a, | |
| | mir-34c, mir-365, mir-373, mir-424, mir- | |
| | 429, mir-455, mir-484, mir-502, mir-503, | |
| | mir-93, mir-98 | |
| hepatocellular | let-7a-1, let-7a-2, let-7a-3, let-7b, let-7c, | mir-106b, mir-10b, mir-122, mir- |
| carcinoma | let-7d, let-7e, let-7f, let-7f-1, let-7f-2, let- | 1228, mir-1269, mir-128a, mir- |
| | 7g, let-7i, mir-1, mir-100, mir-101, mir- | 130a, mir-130b, mir-146a, mir- |
| | 105, mir-122, mir-122a, mir-1236, mir- | 153, mir-155, mir-17-5p, mir- |
| | 124, mir-125b, mir-126, mir-127, mir- | 181a, mir-181a-1, mir-181a-2, |
| | 1271, mir-128-3p, mir-129-5p, mir-130a, | mir-181b, mir-181b-1, mir-181b- |
| | mir-130b, mir-133a, mir-134, mir-137, | 2, mir-181c, mir-181d, mir-182, |
| | mir-138, mir-139, mir-139-5p, mir-140- | mir-183, mir-184, mir-190b, mir- |
| | 5p, mir-141, mir-142-3p, mir-143, mir- | 191, mir-20a, mir-20b, mir-21, |
| | 144, mir-145, mir-146a, mir-148a, mir- | mir-210, mir-214, mir-215, mir- |
| | 148b, mir-150-5p, mir-15b, mir-16, mir- | 216a, mir-217, mir-221, mir-222, |
| | 181a-5p, mir-185, mir-188-5p, mir-193b, | mir-223, mir-224, mir-23a, mir- |
| | mir-195, mir-195-5p, mir-197, mir-198, | 24, mir-25, mir-27a, mir-301a, |
| | mir-199a, mir-199a-5p, mir-199b, mir- | mir-30d, mir-31, mir-3127, mir- |
| | 199b-5p, mir-200a, mir-200b, mir-200c, | 32, mir-331-3p, mir-362-3p, mir- |
| | mir-202, mir-203, mir-204-3p, mir-205, | 371-5p, mir-372, mir-373, mir- |
| | mir-206, mir-20a, mir-21, mir-21-3p, | 423, mir-429, mir-452, mir-483- |
| | mir-211, mir-212, mir-214, mir-217, mir- | 3p, mir-483-5p, mir-485-3p, mir- |
| | 218, mir-219-5p, mir-22, mir-26a, mir- | 490-3p, mir-494, mir-495, mir- |
| | 26b, mir-29a, mir-29b-1, mir-29b-2, mir- | 500, mir-501-5p, mir-519d, mir- |
| | 29c, mir-302b, mir-302c, mir-30a, mir- | 520g, mir-574-3p, mir-590-5p, |
| | 30a-3p, mir-335, mir-338-3p, mir-33a, | mir-630, mir-650, mir-657, mir- |
| | mir-34a, mir-34b, mir-365, mir-370, mir- | 664, mir-885-5p, mir-9, mir-92a, |
| | 372, mir-375, mir-376a, mir-377, mir- | mir-96 |
| | 422a, mir-424, mir-424-5p, mir-433, mir- | |
| | 4458, mir-448, mir-450a, mir-451, mir- | |
| | 485-5p, mir-486-5p, mir-497, mir-503, | |
| | mir-506, mir-519d, mir-520a, mir-520b, | |
| | mir-520c-3p, mir-582-5p, mir-590-5p, | |
| | mir-610, mir-612, mir-625, mir-637, mir- | |
| | 675, mir-7, mir-877, mir-940, mir-941, | |
| | mir-98, mir-99a | |
| lung cancer | let-7a-1, let-7a-2, let-7a-3, let-7b, let-7c, | mir-10b, mir-135b, mir-150, mir- |
| | let-7d, let-7e, let-7f-1, let-7f-2, let-7g, | 155, mir-17, mir-182, mir-183- |
| | let-7i, mir-1, mir-101, mir-133b, mir- | 3p, mir-18a, mir-197, mir-19a, |
| | 138, mir-142-5p, mir-144, mir-145, mir- | mir-19b, mir-205, mir-20a, mir- |
| | 1469, mir-146a, mir-153, mir-15a, mir- | 21, mir-210, mir-24, mir-30d, |
| | 15b, mir-16-1, mir-16-2, mir-182, mir- | mir-4423, mir-5100, mir-570, |
| | 192, mir-193a-3p, mir-194, mir-195, mir- | mir-663, mir-7, mir-92a |
| | 198, mir-203, mir-217, mir-218, mir-22, | |
| | mir-223, mir-26a, mir-26b, mir-29c, mir- | |
| | 33a, mir-34a, mir-34b, mir-34c, mir-365, | |
| | mir-449a, mir-449b, mir-486-5p, mir- | |
| | 545, mir-610, mir-614, mir-630, mir-660, | |
| | mir-7-5p, mir-9500, mir-98, mir-99b | |
| neuroblastoma | let-7a-1, let-7a-2, let-7a-3, let-7b, let-7c, | mir-125b, mir-15a, mir-15b, mir- |
| | let-7d, let-7e, let-7f-1, let-7f-2, let-7g, | 16-1, mir-16-2, mir-18a, mir-195, |
| | let-7i, mir-124, mir-137, mir-145, mir- | mir-19a, mir-23a, mir-421, mir- |
| | 181c, mir-184, mir-200a, mir-29a, mir- | 92 |
| | 335, mir-338-3p, mir-34a, mir-449a, mir- | |
| | 885-5p, mir-98 | |
| prostate cancer | let-7a-3p, let-7c, mir-100, mir-101, mir- | mir-125b, mir-141, mir-153, mir- |
| | 105, mir-124, mir-128, mir-1296, mir- | 155, mir-181a-1, mir-181a-2, |
| | 130b, mir-133a-1, mir-133a-2, mir-133b, | mir-181b, mir-181b-1, mir-181b- |
| | mir-135a, mir-143, mir-145, mir-146a, | 2, mir-181c, mir-181d, mir-182, |
| | mir-154, mir-15a, mir-187, mir-188-5p, | mir-182-5p, mir-183, mir-18a, |
| | mir-199b, mir-200b, mir-203, mir-205, | mir-204, mir-20a, mir-21, mir- |
| | mir-212, mir-218, mir-221, mir-224, mir- | 221, mir-223-3p, mir-31, mir- |
| | 23a, mir-23b, mir-25, mir-26a, mir-26b, | 429, mir-96 |
| | mir-29b, mir-302a, mir-30a, mir-30b, | |
| | mir-30c-1, mir-30c-2, mir-30d, mir-30e, | |
| | mir-31, mir-330, mir-331-3p, mir-34a, | |
| | mir-34b, mir-34c, mir-374b, mir-449a, | |
| | mir-4723-5p, mir-497, mir-628-5p, mir- | |
| | 642a-5p, mir-720, mir-940 | |
| acute lymphoblastic | let-7b, mir-124a, mir-142-3p | mir-128 |
| leukemia | | |
| malignant melanoma | let-7b, mir-101, mir-125b, mir-1280, | mir-126, mir-141, mir-15b, mir- |
| | mir-143, mir-146a, mir-146b, mir-155, | 17, mir-17-5p, mir-182, mir-18a, |
| | mir-17, mir-184, mir-185, mir-18b, mir- | mir-193b, mir-200a, mir-200b, |
| | 193b, mir-200c, mir-203, mir-204, mir- | mir-200c, mir-20a, mir-21, mir- |
| | 205, mir-206, mir-20a, mir-211, mir-218, | 210, mir-214, mir-221, mir-222, |
| | mir-26a, mir-31, mir-33a, mir-34a, mir- | mir-429, mir-455-5p, mir-532-5p, |
| | 34c, mir-376a, mir-376c, mir-573, mir-7, | mir-638, mir-92a |
| | mir-9, mir-98 | |
| renal clear cell | let-7b, let-7c, mir-138, mir-141, mir- | mir-122, mir-155, mir-630 |
| carcinoma | 200c, mir-204, mir-218, mir-335, mir- | |
| | 377, mir-506 | |
| acute myeloid | let-7c, mir-17, mir-181a, mir-20a, mir- | mir-125b, mir-126-5p, mir-128, |
| leukemia | 223, mir-26a, mir-29a, mir-30c, mir-7 | mir-155, mir-29a, mir-32, mir- |
| | | 331, mir-370, mir-378 |
| acute promyelocytic | let-7c, mir-107, mir-342 | mir-181a, mir-181b, mir-92a |
| leukemia | | |
| head and neck | let-7d, mir-1, mir-107, mir-128, mir- | mir-106b, mir-134, mir-16, mir- |
| squamous cell | 133a, mir-138, mir-149, mir-200c, mir- | 184, mir-196a, mir-21, mir-25, |
| carcinoma | 205, mir-218, mir-27a*, mir-29a, mir- | mir-30a-5p, mir-31, mir-372, |
| | 29b-1, mir-29b-2, mir-29c, mir-300, mir- | mir-93 |
| | 34a, mir-363, mir-375, mir-874 | |
| oral cancer | let-7d, mir-218, mir-34a, mir-375, mir- | mir-10b, mir-196a-1, mir-196a-2, |
| | 494 | mir-196b, mir-21 |
| papillary thyroid | mir-101, mir-130b, mir-138, mir-146a, | let-7e, mir-146b, mir-146b-5p, |
| carcinoma | mir-16, mir-195, mir-199a-3p, mir-204- | mir-151-5p, mir-155, mir-181a-1, |
| | 5p, mir-219-5p, mir-26a, mir-34b, mir- | mir-181a-2, mir-181b-1, mir- |
| | 613 | 181b-2, mir-181c, mir-181d, mir- |
| | | 182, mir-183, mir-199b-5p, mir- |
| | | 21, mir-221, mir-222, mir-339- |
| | | 5p, mir-34a |
| glioblastoma | let-7g-5p, mir-100, mir-101, mir-106a, | mir-10b, mir-125b, mir-127-3p, |
| | mir-124, mir-124a, mir-125a, mir-125a- | mir-148a, mir-18a, mir-196a, |
| | 5p, mir-125b, mir-127-3p, mir-128, mir- | mir-196a-1, mir-196a-2, mir- |
| | 129, mir-136, mir-137, mir-139-5p, mir- | 196b, mir-21, mir-210, mir-210- |
| | 142-3p, mir-143, mir-145, mir-146b-5p, | 3p, mir-223, mir-340, mir-576- |
| | mir-149, mir-152, mir-153, mir-195, mir- | 5p, mir-626, mir-92b |
| | 21, mir-212-3p, mir-219-5p, mir-222, | |
| | mir-29b, mir-31, mir-3189-3p, mir-320, | |
| | mir-320a, mir-326, mir-330, mir-331-3p, | |
| | mir-340, mir-342, mir-34a, mir-376a, | |
| | mir-449a, mir-483-5p, mir-503, mir-577, | |
| | mir-663, mir-7, mir-744 | |
| ovarian cancer | let-7i, mir-100, mir-124, mir-125b, mir- | mir-106a, mir-141, mir-148b, |
| | 129-5p, mir-130b, mir-133a, mir-137, | mir-181b, mir-182, mir-200a, |
| | mir-138, mir-141, mir-145, mir-148a, | mir-200c, mir-205, mir-20a, mir- |
| | mir-152, mir-153, mir-155, mir-199a, | 21, mir-210, mir-214, mir-221, |
| | mir-200a, mir-200b, mir-200c, mir-212, | mir-224-5p, mir-23b, mir-25, |
| | mir-335, mir-34a, mir-34b, mir-34c, mir- | mir-26a, mir-27a, mir-27b, mir- |
| | 409-3p, mir-411, mir-429, mir-432, mir- | 346, mir-378, mir-424, mir-503, |
| | 449a, mir-494, mir-497, mir-498, mir- | mir-572, mir-9, mir-96 |
| | 519d, mir-655, mir-9, mir-98 | |
| bladder cancer | mir-1, mir-101, mir-1180, mir-1236, mir- | mir-103a-3p, mir-10b, mir-135a, |
| | 124-3p, mir-125b, mir-126, mir-1280, | mir-137, mir-141, mir-155, mir- |
| | mir-133a, mir-133b, mir-141, mir-143, | 17-5p, mir-182, mir-182-5p, mir- |
| | mir-144, mir-145, mir-155, mir-16, mir- | 183, mir-185, mir-19a, mir-203, |
| | 18a, mir-192, mir-195, mir-200a, mir- | mir-205, mir-210, mir-221, mir- |
| | 200b, mir-200c, mir-203, mir-205, mir- | 222, mir-223, mir-23a, mir-23b, |
| | 214, mir-218, mir-23b, mir-26a, mir-29c, | mir-26b, mir-639, mir-96 |
| | mir-320c, mir-34a, mir-370, mir-409-3p, | |
| | mir-429, mir-451, mir-490-5p, mir-493, | |
| | mir-576-3p, mir-99a | |
| chordoma | mir-1, mir-222, mir-31, mir-34a, mir-608 | mir-140-3p, mir-148a |
| kidney cancer | mir-1, mir-145, mir-1826, mir-199a, mir- | mir-183, mir-21, mir-210, mir- |
| | 199a-3p, mir-203, mir-205, mir-497, mir- | 223 |
| | 508-3p, mir-509-3p | |
| cervical carcinoma | mir-100, mir-101, mir-15a, mir-16, mir- | mir-133b, mir-21, mir-25, mir- |
| | 34a, mir-886-5p, mir-99a, mir-99b | 373 |
| mesenchymal cancer | mir-100, mir-141, mir-199b-5p, mir- | mir-125b-1-3p, mir-182 |
| | 200a, mir-200b, mir-200c, mir-29a, mir- | |
| | 29b-1, mir-29b-1-5p, mir-29b-2, mir-29c, | |
| | mir-335, mir-429, mir-99a | |
| oral squamous cell | mir-100, mir-124, mir-1250, mir-125b, | mir-125b, mir-126, mir-146a, |
| carcinoma | mir-126, mir-1271, mir-136, mir-138, | mir-146b, mir-155, mir-181b, |
| | mir-145, mir-147, mir-148a, mir-181a, | mir-196a-1, mir-196a-2, mir- |
| | mir-206, mir-220a, mir-26a, mir-26b, | 196b, mir-21, mir-221, mir-222, |
| | mir-29a, mir-32, mir-323-5p, mir-329, | mir-24, mir-27b, mir-31, mir-345 |
| | mir-338, mir-370, mir-410, mir-429, mir- | |
| | 433, mir-499a-5p, mir-503, mir-506, mir- | |
| | 632, mir-646, mir-668, mir-877, mir-9 | |
| ovarian carcinoma | mir-100, mir-101, mir-34b, mir-34c, mir- | mir-148b, mir-182 |
| | 532-5p | |
| cholangiocarcinoma | mir-101, mir-144, mir-200b, mir-200c | mir-17, mir-18a, mir-19a, mir- |
| | | 19b, mir-20a, mir-21, mir-26a, |
| | | mir-92a |
| endometrial cancer | mir-101, mir-130a, mir-130b, mir-134, | mir-106a, mir-145, mir-155, mir- |
| | mir-143, mir-145, mir-152, mir-205, mir- | 182, mir-200b, mir-200c, mir- |
| | 223, mir-301a, mir-301b, mir-30c, mir- | 205, mir-21, mir-222-3p, mir-25, |
| | 34a, mir-34c, mir-424, mir-449a, mir- | mir-93 |
| | 543 | |
| esophageal cancer | mir-124, mir-126, mir-140, mir-197, mir- | mir-101, mir-10b, mir-130a, mir- |
| | 203, mir-218, mir-223, mir-30b, mir-375, | 141, mir-143, mir-146b, mir-15a, |
| | mir-454, mir-486, mir-574-3p | mir-183, mir-196b, mir-200a, |
| | | mir-203, mir-205, mir-21, mir- |
| | | 210, mir-221, mir-27a, mir-28- |
| | | 3p, mir-31, mir-452, mir-96, mir- |
| | | 99b |
| liver cancer | mir-101, mir-122, mir-132, mir-140-5p, | mir-1301, mir-155, mir-21, mir- |
| | mir-145, mir-148b, mir-31, mir-338-3p, | 221, mir-27a, mir-525-3p |
| | mir-433 | |
| pancreatic cancer | mir-101, mir-1181, mir-124, mir-1247, | mir-10a, mir-10b, mir-132, mir- |
| | mir-133a, mir-141, mir-145, mir-146a, | 15a, mir-17-5p, mir-181a, mir- |
| | mir-148a, mir-148b, mir-150*, mir-150- | 18a, mir-191, mir-196a, mir-21, |
| | 5p, mir-152, mir-15a, mir-198, mir-203, | mir-212, mir-214, mir-222, mir- |
| | mir-214, mir-216a, mir-29c, mir-335, | 27a, mir-301a, mir-301a-3p, mir- |
| | mir-34a, mir-34b, mir-34c, mir-373, mir- | 367, mir-424-5p, mir-7, mir-92, |
| | 375, mir-410, mir-497, mir-615-5p, mir- | mir-99a |
| | 630, mir-96 | |
| retinoblastoma | mir-101, mir-183, mir-204, mir-34a, mir- | mir-181b, mir-21 |
| | 365b-3p, mir-486-3p, mir-532-5p | |
| cervical squamous cell | mir-106a, mir-124, mir-148a, mir-214, | mir-205 |
| carcinoma | mir-218, mir-29a, mir-375 | |
| clear cell renal cell | mir-106a-5p, mir-135a-5p, mir-206 | mir-142-5p, mir-155, mir-21-5p |
| cancer | | |
| laryngeal carcinoma | | mir-106b, mir-16, mir-21, mir- |
| | | 27a, mir-423-3p |
| medulloblastoma | mir-124, mir-128a, mir-199b-5p, mir- | mir-106b, mir-17, mir-18a, mir- |
| | 206, mir-22, mir-31, mir-383 | 19a, mir-19b, mir-20a, mir-30b, |
| | | mir-30d, mir-92 |
| pituitary carcinoma | | mir-106b, mir-122, mir-20a, mir- |
| | | 493 |
| prostate carcinoma | mir-107 | |
| cervical cancer | mir-143, mir-145, mir-17-5p, mir-203, | mir-10a, mir-155, mir-181a, mir- |
| | mir-214, mir-218, mir-335, mir-342-3p, | 181b, mir-196a, mir-19a, mir- |
| | mir-372, mir-424, mir-491-5p, mir-497, | 19b, mir-205, mir-20a, mir-21, |
| | mir-7, mir-99a, mir-99b | mir-215, mir-224, mir-31, mir- |
| | | 494, mir-590-5p, mir-92a, mir- |
| | | 944 |
| chronic myelogenous | mir-10a, mir-146a, mir-150, mir-151, | mir-424, mir-96 |
| leukemia | mir-155, mir-2278, mir-26a, mir-30e, | |
| | mir-31, mir-326, mir-564 | |
| gastrointestinal cancer | mir-122a, mir-148a, mir-152 | |
| anaplastic astrocytoma | mir-124, mir-137 | |
| astrocytoma | mir-124-3p, mir-181b-5p, mir-200b, mir- | mir-335 |
| | 3189-3p | |
| epithelial ovarian | mir-124a, mir-192, mir-193a, mir-7 | mir-372, mir-373 |
| cancer | | |
| mantle cell lymphoma | mir-142-3p, mir-142-5p, mir-150, mir- | mir-124a, mir-155, mir-17, mir- |
| | 223, mir-29a, mir-29b, mir-29c | 18a, mir-19a, mir-19b, mir-20a, |
| | | mir-92a |
| chronic lymphocytic | mir-125b, mir-138, mir-15a, mir-15b, | mir-150, mir-155 |
| leukemia | mir-16, mir-16-1, mir-16-1-3p, mir-16-2, | |
| | mir-181a, mir-181b, mir-195, mir-223, | |
| | mir-29b, mir-34b, mir-34c, mir-424 | |
| follicular cancer | NA | mir-125b |
| malignant | mir-126 | |
| mesothelioma | | |
| small cell lung cancer | mir-126, mir-138, mir-27a | mir-25 |
| meningioma | mir-128, mir-200a | mir-224, mir-335 |
| laryngeal squamous | mir-129-5p, mir-203, mir-205, mir-206, | mir-21, mir-9, mir-93 |
| cell carcinoma | mir-24, mir-370, mir-375 | |
| medullary thyroid | mir-129-5p | mir-183 |
| carcinoma | | |
| lung adenocarcinoma | mir-1297, mir-141, mir-145, mir-16, mir- | mir-150, mir-155, mir-31 |
| | 200a, mir-200b, mir-200c, mir-29b, mir- | |
| | 381, mir-409-3p, mir-429, mir-451, mir- | |
| | 511, mir-99a | |
| pancreatic carcinoma | mir-132, mir-375 | mir-301b |
| lung squamous cell | mir-133a, mir-218 | |
| carcinoma | | |
| multiple myeloma | mir-137, mir-197, mir-214 | mir-21 |
| squamous carcinoma | mir-15a, mir-16, mir-203, mir-205, mir- | mir-137, mir-155, mir-184, mir- |
| | 375 | 196a, mir-203, mir-21, mir-221, |
| | | mir-27a, mir-34a |
| uveal melanoma | mir-137, mir-144, mir-145, mir-182, mir- | NA |
| | 34a, mir-34b, mir-34c, mir-9 | |
| anaplastic thyroid | mir-138 | mir-146b, mir-221, mir-222 |
| carcinoma | | |
| colorectal carcinoma | mir-139, mir-143, mir-145, mir-202-3p, | mir-17, mir-182, mir-191, mir- |
| | mir-30a, mir-338-3p, mir-429, mir-451, | 21, mir-95 |
| | mir-93 | |
| malt lymphoma | | mir-142-5p, mir-155 |
| thyroid cancer | mir-144, mir-886-3p | |
| primary cns | mir-145, mir-193b, mir-199a, mir-214 | |
| lymphomas | | |
| follicular thyroid | mir-199b | mir-146b, mir-183, mir-197, mir- |
| carcinoma | | 221, mir-346 |
| gallbladder carcinoma | mir-146b-5p | mir-155, mir-182 |
| adult t-cell leukemia | | mir-150 |
| anaplastic large-cell | | mir-155 |
| lymphoma | | |
| cutaneous t-cell | | mir-155 |
| lymphoma | | |
| diffuse large B-cell | | mir-155, mir-21 |
| lymphoma | | |
| rectal cancer | | mir-155, mir-200c, mir-21-5p, |
| | | mir-34a |
| tongue cancer | mir-15b, mir-200b | |
| b-cell lymphoma | mir-34a | mir-17, mir-18a, mir-19a, mir- |
| | | 19b, mir-20a, mir-92a |
| breast carcinoma | | mir-17, mir-18a, mir-19a, mir- |
| | | 19b, mir-20a, mir-24, mir-92a |
| nasopharyngeal cancer | mir-218, mir-223, mir-29c | mir-17, mir-20a |
| gastric | mir-181b, mir-182, mir-200a, mir-302b, | mir-23a, mir-27a, mir-373 |
| adenocarcinoma | mir-449a, mir-9 | |
| colorectal | | mir-182 |
| adenocarcinoma | | |
| colon carcinoma | mir-186, mir-30a-5p | mir-221, mir-23a |
| adrenal cortical | mir-195, mir-1974, mir-335, mir-497 | mir-21, mir-210, mir-483-3p, |
| carcinoma | | mir-483-5p |
| esophageal | mir-203 | mir-196a, mir-199a-3p, mir- |
| adenocarcinoma | | 199a-5p, mir-199b-3p, mir-200a, |
| | | mir-223 |
| gastrointestinal | mir-218, mir-221, mir-222 | mir-196a |
| stromal tumor | | |
| uterine leiomyoma | mir-197 | |
| choriocarcinoma | mir-199b, mir-218, mir-34a | |
| follicular lymphoma | mir-202 | |
| basal cell carcinoma | mir-203 | |
| hypopharyngeal | | mir-203 |
| cancer | | |
| pancreatic | | mir-203, mir-301a |
| adenocarcinoma | | |
| rhabdomyosarcoma | mir-203 | |
| head and neck cancer | NA | mir-21 |
| hypopharyngeal | mir-451a, mir-504 | mir-21 |
| squamous cell | | |
| carcinoma | | |
| t-cell lymphoma | mir-22 | |
| thyroid carcinoma | | mir-221, mir-222 |
| splenic marginal zone | mir-223 | |
| lymphoma | | |
| laryngeal cancer | | mir-23a |
| primary thyroid | mir-26a | |
| lymphoma | | |
| acute leukemia | mir-27a | |
| monocytic leukemia | mir-29a, mir-29b | |
| oral carcinoma | mir-375 | mir-31 |
| primary gallbladder | mir-335 | |
| carcinoma | | |
| endometrial serous | mir-34b | |
| adenocarcinoma | | |
| esophageal carcinoma | mir-451 | |
| hepatoblastoma | | mir-492 |
| colonic | mir-627 | |
| adenocarcinoma | | |

TABLE 12
Exemplary tumor suppressive miRs

| Cancer | Down regulated tumor suppressive miR |
|---|---|
| acute leukemia | mir-27a |
| acute lymphoblastic leukemia | let-7b, mir-124a, mir-142-3p |
| acute myeloid leukemia | let-7c, mir-17, mir-181a, mir-20a, mir-223, mir-26a, mir-29a, mir-30c, |
| | mir-720 |
| acute promyelocytic leukemia | let-7c, mir-107, mir-342 |
| adrenal cortical carcinoma | mir-195, mir-1974, mir-335, mir-497 |
| anaplastic astrocytoma | mir-124, mir-137 |
| anaplastic thyroid carcinoma | mir-138 |
| astrocytoma | mir-124-3p, mir-181b-5p, mir-200b, mir-3189-3p |
| basal cell carcinoma | mir-203 |
| b-cell lymphoma | mir-34a |
| bladder cancer | mir-1, mir-101, mir-1180, mir-1236, mir-124-3p, mir-125b, mir-126, mir- |
| | 1280, mir-133a, mir-133b, mir-141, mir-143, mir-144, mir-145, mir-155, |
| | mir-16, mir-18a, mir-192, mir-195, mir-200a, mir-200b, mir-200c, mir- |
| | 203, mir-205, mir-214, mir-218, mir-23b, mir-26a, mir-29c, mir-320c, |
| | mir-34a, mir-370, mir-409-3p, mir-429, mir-451, mir-490-5p, mir-493, |
| | mir-576-3p, mir-99a |
| breast cancer | let-7a, let-7a-1, let-7a-2, let-7a-3, let-7b, let-7c, let-7d, let-7e, let-7f-1, let- |
| | 7f-2, let-7g, let-7i, mir-100, mir-107, mir-10a, mir-10b, mir-122, mir-124, |
| | mir-1258, mir-125a-5p, mir-125b, mir-126, mir-127, mir-129, mir-130a, |
| | mir-132, mir-133a, mir-143, mir-145, mir-146a, mir-146b, mir-147, mir- |
| | 148a, mir-149, mir-152, mir-153, mir-15a, mir-16, mir-17-5p, mir-181a, |
| | mir-1826, mir-183, mir-185, mir-191, mir-193a-3p, mir-193b, mir-195, |
| | mir-199b-5p, mir-19a-3p, mir-200a, mir-200b, mir-200c, mir-205, mir- |
| | 206, mir-211, mir-216b, mir-218, mir-22, mir-26a, mir-26b, mir-300, |
| | mir-30a, mir-31, mir-335, mir-339-5p, mir-33b, mir-34a, mir-34b, mir- |
| | 34c, mir-374a, mir-379, mir-381, mir-383, mir-425, mir-429, mir-450b- |
| | 3p, mir-494, mir-495, mir-497, mir-502-5p, mir-517a, mir-574-3p, mir- |
| | 638, mir-7, mir-720, mir-873, mir-874, mir-92a, mir-98, mir-99a, mmu- |
| | mir-290-3p, mmu-mir-290-5p |
| bronchioloalveolar carcinoma | let-7a-1, let-7a-2, let-7a-3, let-7b, let-7c, let-7d, let-7e, let-7f-1, let-7f-2, |
| | let-7g, let-7i, mir-98 |
| cervical cancer | mir-143, mir-145, mir-17-5p, mir-203, mir-214, mir-218, mir-335, mir- |
| | 342-3p, mir-372, mir-424, mir-491-5p, mir-497, mir-7, mir-99a, mir-99b |
| cervical carcinoma | mir-100, mir-101, mir-15a, mir-16, mir-34a, mir-886-5p, mir-99a, mir- |
| | 99b |
| cervical squamous cell carcinoma | mir-106a, mir-124, mir-148a, mir-214, mir-218, mir-29a, mir-375 |
| cholangiocarcinoma | mir-101, mir-144, mir-200b, mir-200c |
| chondrosarcoma | let-7a, mir-100, mir-136, mir-145, mir-199a, mir-222, mir-30a, mir-335, |
| | mir-376a |
| chordoma | mir-1, mir-222, mir-31, mir-34a, mir-608 |
| choriocarcinoma | mir-199b, mir-218, mir-34a |
| chronic lymphocytic leukemia | mir-125b, mir-138, mir-15a, mir-15b, mir-16, mir-16-1, mir-16-1-3p, |
| | mir-16-2, mir-181a, mir-181b, mir-195, mir-223, mir-29b, mir-34b, mir- |
| | 34c, mir-424 |
| chronic myelogenous leukemia | mir-10a, mir-138, mir-146a, mir-150, mir-151, mir-155, mir-16, mir- |
| | 2278, mir-26a, mir-30e, mir-31, mir-326, mir-564 |
| clear cell renal cell cancer | mir-106a-5p, mir-135a-5p, mir-206 |
| colon cancer | let-7a-1, let-7a-2, let-7a-3, let-7b, let-7c, let-7d, let-7e, let-7f-1, let-7f-2, |
| | let-7g, let-7i, mir-100, mir-101, mir-126, mir-142-3p, mir-143, mir-145, |
| | mir-192, mir-200c, mir-21, mir-214, mir-215, mir-22, mir-25, mir-302a, |
| | mir-320, mir-320a, mir-34a, mir-34c, mir-365, mir-373, mir-424, mir- |
| | 429, mir-455, mir-484, mir-502, mir-503, mir-93, mir-98 |
| colon carcinoma | mir-186, mir-30a-5p |
| colonic adenocarcinoma | mir-627 |
| colorectal cancer | let-7a, mir-1, mir-100, mir-101, mir-124, mir-125a, mir-126, mir-129, |
| | mir-1295b-3p, mir-1307, mir-130b, mir-132, mir-133a, mir-133b, mir- |
| | 137, mir-138, mir-139, mir-139-5p, mir-140-5p, mir-143, mir-145, mir- |
| | 148a, mir-148b, mir-149, mir-150-5p, mir-154, mir-15a, mir-15b, mir-16, |
| | mir-18a, mir-191, mir-192, mir-193a-5p, mir-194, mir-195, mir-196a, |
| | mir-198, mir-199a-5p, mir-200c, mir-203, mir-204-5p, mir-206, mir-212, |
| | mir-215, mir-218, mir-22, mir-224, mir-24-3p, mir-26b, mir-27a, mir-28- |
| | 3p, mir-28-5p, mir-29b, mir-30a-3p, mir-30b, mir-320a, mir-328, mir- |
| | 338-3p, mir-342, mir-345, mir-34a, mir-34a-5p, mir-361-5p, mir-375, |
| | mir-378, mir-378a-3p, mir-378a-5p, mir-409-3p, mir-422a, mir-4487, |
| | mir-483, mir-497, mir-498, mir-518a-3p, mir-551a, mir-574-5p, mir-625, |
| | mir-638, mir-7, mir-96-5p |
| colorectal carcinoma | mir-139, mir-143, mir-145, mir-202-3p, mir-30a, mir-338-3p, mir-429, |
| | mir-451, mir-93 |
| endometrial cancer | mir-101, mir-130a, mir-130b, mir-134, mir-143, mir-145, mir-152, mir- |
| | 205, mir-223, mir-301a, mir-301b, mir-30c, mir-34a, mir-34c, mir-424, |
| | mir-449a, mir-543 |
| endometrial serous adenocarcinoma | mir-34b |
| epithelial ovarian cancer | mir-124a, mir-192, mir-193a, mir-7 |
| esophageal adenocarcinoma | mir-203 |
| esophageal cancer | mir-124, mir-126, mir-140, mir-197, mir-203, mir-218, mir-223, mir-30b, |
| | mir-375, mir-454, mir-486, mir-574-3p |
| esophageal carcinoma | mir-451 |
| esophageal squamous cell | let-7a, let-7a-1, let-7a-2, let-7a-3, let-7b, let-7c, let-7d, let-7e, let-7f-1, let- |
| carcinoma | 7f-2, let-7g, let-7i, mir-1, mir-100, mir-101, mir-126, mir-1294, mir-133a, |
| | mir-133b, mir-138, mir-143, mir-145, mir-150, mir-185, mir-195, mir- |
| | 200b, mir-203, mir-21, mir-210, mir-214, mir-218, mir-22, mir-27a, mir- |
| | 29b, mir-29c, mir-302b, mir-34a, mir-375, mir-494, mir-518b, mir-655, |
| | mir-98, mir-99a |
| follicular lymphoma | mir-202 |
| follicular thyroid carcinoma | mir-199b |
| gallbladder carcinoma | mir-146b-5p |
| gastric adenocarcinoma | mir-181b, mir-182, mir-200a, mir-302b, mir-449a, mir-9 |
| gastric cancer | let-7a, let-7b, let-7g, mir-1, mir-101, mir-103a, mir-10a, mir-10b, mir- |
| | 1207-5p, mir-122, mir-1228*, mir-124, mir-124-3p, mir-125a-3p, mir- |
| | 126, mir-1266, mir-127, mir-1271, mir-129-1-3p, mir-129-2-3p, mir-129- |
| | 3p, mir-129-5p, mir-133a, mir-133b, mir-137, mir-141, mir-143, mir-144, |
| | mir-145, mir-146a, mir-146a-5p, mir-148a, mir-148b, mir-149, mir-152, |
| | mir-155, mir-155-5p, mir-181a, mir-181b, mir-182, mir-183, mir-185, |
| | mir-194, mir-195, mir-197, mir-199a-3p, mir-200b, mir-200c, mir-202- |
| | 3p, mir-204, mir-204-5p, mir-205, mir-206, mir-210, mir-212, mir-217, |
| | mir-218, mir-22, mir-23b, mir-24, mir-26a, mir-29a, mir-29a-3p, mir-29b, |
| | mir-29b-1, mir-29b-2, mir-29c, mir-30a-5p, mir-30b, mir-31, mir-328, |
| | mir-329, mir-331-3p, mir-335-5p, mir-338, mir-338-3p, mir-34a, mir- |
| | 34b, mir-34c, mir-361-5p, mir-367, mir-375, mir-378, mir-409-3p, mir- |
| | 410, mir-429, mir-433, mir-449, mir-449a, mir-490-3p, mir-494, mir-497, |
| | mir-503, mir-506, mir-513b, mir-520d-3p, mir-542-3p, mir-622, mir-625, |
| | mir-638, mir-663, mir-7, mir-874, mir-9 |
| gastrointestinal cancer | mir-122a, mir-148a, mir-152 |
| gastrointestinal stromal tumor | mir-218, mir-221, mir-222 |
| glioblastoma | let-7g-5p, mir-100, mir-101, mir-106a, mir-124, mir-124a, mir-125a, mir- |
| | 125a-5p, mir-125b, mir-127-3p, mir-128, mir-129, mir-136, mir-137, mir- |
| | 139-5p, mir-142-3p, mir-143, mir-145, mir-146b-5p, mir-149, mir-152, |
| | mir-153, mir-195, mir-21, mir-212-3p, mir-219-5p, mir-222, mir-29b, |
| | mir-31, mir-3189-3p, mir-320, mir-320a, mir-326, mir-330, mir-331-3p, |
| | mir-340, mir-342, mir-34a, mir-376a, mir-449a, mir-483-5p, mir-503, |
| | mir-577, mir-663, mir-7, mir-7-5p, mir-873 |
| glioma | let-7a, let-7f, mir-106a, mir-107, mir-122, mir-124, mir-124-5p, mir- |
| | 124a, mir-125b, mir-128, mir-136, mir-137, mir-139, mir-143, mir-145, |
| | mir-146a, mir-146b, mir-146b-5p, mir-152, mir-15b, mir-16, mir-181a, |
| | mir-181a-1, mir-181a-2, mir-181b, mir-181b-1, mir-181b-2, mir-181c, |
| | mir-181d, mir-184, mir-185, mir-195, mir-199a-3p, mir-200a, mir-200b, |
| | mir-203, mir-204, mir-205, mir-218, mir-219-5p, mir-23b, mir-26b, mir- |
| | 27a, mir-29c, mir-320, mir-326, mir-328, mir-34a, mir-34c-3p, mir-34c- |
| | 5p, mir-375, mir-383, mir-451, mir-452, mir-483-5p, mir-495, mir-584, |
| | mir-622, mir-656, mir-7, mir-98 |
| head and neck squamous cell | let-7d, mir-1, mir-107, mir-128, mir-133a, mir-138, mir-149, mir-200c, |
| carcinoma | mir-205, mir-218, mir-27a*, mir-29a, mir-29b-1, mir-29b-2, mir-29c, |
| | mir-300, mir-34a, mir-363, mir-375, mir-874 |
| hepatocellular carcinoma | let-7a-1, let-7a-2, let-7a-3, let-7b, let-7c, let-7d, let-7e, let-7f, let-7f-1, let- |
| | 7f-2, let-7g, let-7i, mir-1, mir-100, mir-101, mir-105, mir-122, mir-122a, |
| | mir-1236, mir-124, mir-125b, mir-126, mir-127, mir-1271, mir-128-3p, |
| | mir-129-5p, mir-130a, mir-130b, mir-133a, mir-134, mir-137, mir-138, |
| | mir-139, mir-139-5p, mir-140-5p, mir-141, mir-142-3p, mir-143, mir- |
| | 144, mir-145, mir-146a, mir-148a, mir-148b, mir-150-5p, mir-15b, mir- |
| | 16, mir-181a-5p, mir-185, mir-188-5p, mir-193b, mir-195, mir-195-5p, |
| | mir-197, mir-198, mir-199a, mir-199a-5p, mir-199b, mir-199b-5p, mir- |
| | 200a, mir-200b, mir-200c, mir-202, mir-203, mir-204-3p, mir-205, mir- |
| | 206, mir-20a, mir-21, mir-21-3p, mir-211, mir-212, mir-214, mir-217, |
| | mir-218, mir-219-5p, mir-22, mir-223, mir-26a, mir-26b, mir-29a, mir- |
| | 29b-1, mir-29b-2, mir-29c, mir-302b, mir-302c, mir-30a, mir-30a-3p, |
| | mir-335, mir-338-3p, mir-33a, mir-34a, mir-34b, mir-365, mir-370, mir- |
| | 372, mir-375, mir-376a, mir-377, mir-422a, mir-424, mir-424-5p, mir- |
| | 433, mir-4458, mir-448, mir-450a, mir-451, mir-485-5p, mir-486-5p, mir- |
| | 497, mir-503, mir-506, mir-519d, mir-520a, mir-520b, mir-520c-3p, mir- |
| | 582-5p, mir-590-5p, mir-610, mir-612, mir-625, mir-637, mir-675, mir-7, |
| | mir-877, mir-940, mir-941, mir-98, mir-99a |
| hypopharyngeal squamous cell | mir-451a, mir-504 |
| carcinoma | |
| kidney cancer | mir-1, mir-145, mir-1826, mir-199a, mir-199a-3p, mir-203, mir-205, mir- |
| | 497, mir-508-3p, mir-509-3p |
| laryngeal squamous cell carcinoma | mir-129-5p, mir-203, mir-205, mir-206, mir-24, mir-370, mir-375 |
| liver cancer | mir-101, mir-122, mir-132, mir-140-5p, mir-145, mir-148b, mir-31, mir- |
| | 338-3p, mir-433 |
| lung adenocarcinoma | mir-1297, mir-141, mir-145, mir-16, mir-200a, mir-200b, mir-200c, mir- |
| | 29b, mir-381, mir-409-3p, mir-429, mir-451, mir-511, mir-99a |
| lung cancer | let-7a-1, let-7a-2, let-7a-3, let-7b, let-7c, let-7d, let-7e, let-7f-1, let-7f-2, |
| | let-7g, let-7i, mir-1, mir-101, mir-133b, mir-138, mir-142-5p, mir-144, |
| | mir-145, mir-1469, mir-146a, mir-153, mir-15a, mir-15b, mir-16-1, mir- |
| | 16-2, mir-182, mir-192, mir-193a-3p, mir-194, mir-195, mir-198, mir- |
| | 203, mir-217, mir-218, mir-22, mir-223, mir-26a, mir-26b, mir-29c, mir- |
| | 33a, mir-34a, mir-34b, mir-34c, mir-365, mir-449a, mir-449b, mir-486- |
| | 5p, mir-545, mir-610, mir-614, mir-630, mir-660, mir-7515, mir-9500, |
| | mir-98, mir-99b |
| lung squamous cell carcinoma | mir-133a, mir-218 |
| malignant melanoma | let-7b, mir-101, mir-125b, mir-1280, mir-143, mir-146a, mir-146b, mir- |
| | 155, mir-17, mir-184, mir-185, mir-18b, mir-193b, mir-200c, mir-203, |
| | mir-204, mir-205, mir-206, mir-20a, mir-211, mir-218, mir-26a, mir-31, |
| | mir-33a, mir-34a, mir-34c, mir-376a, mir-376c, mir-573, mir-7-5p, mir-9, |
| | mir-98 |
| malignant mesothelioma | mir-126 |
| mantle cell lymphoma | mir-142-3p, mir-142-5p, mir-150, mir-223, mir-29a, mir-29b, mir-29c |
| medullary thyroid carcinoma | mir-129-5p |
| medulloblastoma | mir-124, mir-128a, mir-199b-5p, mir-206, mir-22, mir-31, mir-383 |
| meningioma | mir-128, mir-200a |
| mesenchymal cancer | mir-100, mir-141, mir-199b-5p, mir-200a, mir-200b, mir-200c, mir-29a, |
| | mir-29b-1, mir-29b-1-5p, mir-29b-2, mir-29c, mir-335, mir-429, mir-99a |
| monocytic leukemia | mir-29a, mir-29b |
| multiple myeloma | mir-137, mir-197, mir-214 |
| nasopharyngeal cancer | mir-218, mir-223, mir-29c |
| nasopharyngeal carcinoma | let-7a, let-7a-1, let-7a-2, let-7a-3, let-7b, let-7c, let-7d, let-7e, let-7f-1, let- |
| | 7f-2, let-7g, let-7i, mir-1, mir-101, mir-124, mir-138, mir-143, mir-145, |
| | mir-148a, mir-200b, mir-204, mir-216b, mir-223, mir-29c, mir-320a, mir- |
| | 324-3p, mir-34c, mir-375, mir-378, mir-451, mir-506, mir-9, mir-98 |
| neuroblastoma | let-7a-1, let-7a-2, let-7a-3, let-7b, let-7c, let-7d, let-7e, let-7f-1, let-7f-2, |
| | let-7g, let-7i, mir-124, mir-137, mir-145, mir-181c, mir-184, mir-200a, |
| | mir-29a, mir-335, mir-338-3p, mir-34a, mir-449a, mir-885-5p, mir-98 |
| non-small cell lung cancer | let-7a, let-7c, mir-1, mir-100, mir-101, mir-106a, mir-107, mir-124, mir- |
| | 125a-3p, mir-125a-5p, mir-126, mir-126*, mir-129, mir-133a, mir-137, |
| | mir-138, mir-140, mir-143, mir-145, mir-146a, mir-146b, mir-148a, mir- |
| | 148b, mir-149, mir-152, mir-153, mir-154, mir-155, mir-15a, mir-16, |
| | mir-17-5p, mir-181a-1, mir-181a-2, mir-181b, mir-181b-1, mir-181b-2, |
| | mir-181c, mir-181d, mir-184, mir-186, mir-193b, mir-195, mir-199a, mir- |
| | 204, mir-212, mir-221, mir-224, mir-26b, mir-27a, mir-27b, mir-29a, mir- |
| | 29b, mir-29c, mir-30a, mir-30b, mir-30c, mir-30d, mir-30d-5p, mir-30e- |
| | 5p, mir-32, mir-335, mir-338-3p, mir-340, mir-342-3p, mir-34a, mir-34b, |
| | mir-361-3p, mir-365, mir-373, mir-375, mir-429, mir-449a, mir-4500, |
| | mir-451, mir-4782-3p, mir-497, mir-503, mir-512-3p, mir-520a-3p, mir- |
| | 526b, mir-625*, mir-96, mir-99a |
| oral cancer | let-7d, mir-218, mir-34a, mir-375, mir-494 |
| oral carcinoma | mir-375 |
| oral squamous cell carcinoma | mir-100, mir-124, mir-1250, mir-125b, mir-126, mir-1271, mir-136, mir- |
| | 138, mir-145, mir-147, mir-148a, mir-181a, mir-206, mir-220a, mir-26a, |
| | mir-26b, mir-29a, mir-32, mir-323-5p, mir-329, mir-338, mir-370, mir- |
| | 410, mir-429, mir-433, mir-499a-5p, mir-503, mir-506, mir-632, mir-646, |
| | mir-668, mir-877, mir-9 |
| osteosarcoma | let-7a, mir-1, mir-100, mir-101, mir-122, mir-124, mir-125b, mir-126, |
| | mir-127-3p, mir-132, mir-133a, mir-141, mir-142-3p, mir-142-5p, mir- |
| | 143, mir-144, mir-145, mir-153, mir-16, mir-183, mir-194, mir-195, mir- |
| | 199a-3p, mir-204, mir-212, mir-217, mir-218, mir-22, mir-23a, mir-24, |
| | mir-26a, mir-26b, mir-29b, mir-32, mir-320, mir-335, mir-33b, mir-340, |
| | mir-34a, mir-34b, mir-34c, mir-375, mir-376c, mir-382, mir-3928, mir- |
| | 424, mir-429, mir-449a, mir-451, mir-454, mir-503, mir-519d, mir-646 |
| ovarian cancer | let-7i, mir-100, mir-124, mir-125b, mir-129-5p, mir-130b, mir-133a, mir- |
| | 137, mir-138, mir-141, mir-145, mir-148a, mir-152, mir-153, mir-155, |
| | mir-199a, mir-200a, mir-200b, mir-200c, mir-212, mir-335, mir-34a, mir- |
| | 34b, mir-34c, mir-409-3p, mir-411, mir-429, mir-432, mir-449a, mir-494, |
| | mir-497, mir-498, mir-519d, mir-655, mir-9, mir-98 |
| ovarian carcinoma | mir-100, mir-101, mir-34b, mir-34c, mir-532-5p |
| pancreatic cancer | mir-101, mir-1181, mir-124, mir-1247, mir-133a, mir-141, mir-145, mir- |
| | 146a, mir-148a, mir-148b, mir-150*, mir-150-5p, mir-152, mir-15a, mir- |
| | 198, mir-203, mir-214, mir-216a, mir-29c, mir-335, mir-34a, mir-34b, |
| | mir-34c, mir-373, mir-375, mir-410, mir-497, mir-615-5p, mir-630, mir- |
| | 96 |
| pancreatic carcinoma | mir-132, mir-375 |
| pancreatic ductal adenocarcinoma | let-7a, let-7a-1, let-7a-2, let-7a-3, let-7b, let-7c, let-7d, let-7e, let-7f-1, let- |
| | 7f-2, let-7g, let-7i, mir-126, mir-135a, mir-143, mir-144, mir-145, mir- |
| | 148a, mir-150, mir-15a, mir-16, mir-200a, mir-200b, mir-200c, mir-217, |
| | mir-218, mir-337, mir-375, mir-494, mir-615-5p, mir-98 |
| papillary thyroid carcinoma | mir-101, mir-130b, mir-138, mir-146a, mir-16, mir-195, mir-199a-3p, |
| | mir-204-5p, mir-219-5p, mir-26a, mir-34b, mir-613 |
| primary cns lymphomas | mir-145, mir-193b, mir-199a, mir-214 |
| primary gallbladder carcinoma | mir-335 |
| primary thyroid lymphoma | mir-26a |
| prostate cancer | let-7a-3p, let-7c, mir-100, mir-101, mir-105, mir-124, mir-128, mir-1296, |
| | mir-130b, mir-133a-1, mir-133a-2, mir-133b, mir-135a, mir-143, mir- |
| | 145, mir-146a, mir-154, mir-15a, mir-187, mir-188-5p, mir-199b, mir- |
| | 200b, mir-203, mir-205, mir-212, mir-218, mir-221, mir-224, mir-23a, |
| | mir-23b, mir-25, mir-26a, mir-26b, mir-29b, mir-302a, mir-30a, mir-30b, |
| | mir-30c-1, mir-30c-2, mir-30d, mir-30e, mir-31, mir-330, mir-331-3p, |
| | mir-34a, mir-34b, mir-34c, mir-374b, mir-449a, mir-4723-5p, mir-497, |
| | mir-628-5p, mir-642a-5p, mir-765, mir-940 |
| prostate carcinoma | mir-107 |
| renal cell carcinoma | let-7a, let-7d, mir-1, mir-106a*, mir-126, mir-1285, mir-129-3p, mir- |
| | 1291, mir-133a, mir-135a, mir-138, mir-141, mir-143, mir-145, mir-182- |
| | 5p, mir-199a-3p, mir-200a, mir-205, mir-218, mir-28-5p, mir-30a, mir- |
| | 30c, mir-30d, mir-34a, mir-378, mir-429, mir-509-3p, mir-509-5p, mir- |
| | 646 |
| renal clear cell carcinoma | let-7b, let-7c, mir-138, mir-141, mir-200c, mir-204, mir-218, mir-335, |
| | mir-377, mir-506 |
| retinoblastoma | mir-101, mir-183, mir-204, mir-34a, mir-365b-3p, mir-486-3p, mir-532- |
| | 5p |
| rhabdomyosarcoma | mir-203 |
| small cell lung cancer | mir-126, mir-138, mir-27a |
| splenic marginal zone lymphoma | mir-223 |
| squamous carcinoma | mir-15a, mir-16, mir-203, mir-205, mir-375 |
| t-cell lymphoma | mir-22 |
| thyroid cancer | mir-144, mir-886-3p |
| tongue cancer | mir-15b, mir-200b |
| uterine leiomyoma | mir-197 |
| uveal melanoma | mir-137, mir-144, mir-145, mir-182, mir-34a, mir-34b, mir-34c, mir-9 |

TABLE 13
Exemplary oncogenic miRs

| Cancer | miRNA |
|---|---|
| colorectal cancer | let-7a, mir-103, mir-106a, mir-10b, mir-1179, mir-1229, mir-1246, mir-125b-2*, mir- |
| | 1269a, mir-130b, mir-133b, mir-135a, mir-135a-1, mir-135a-2, mir-135b, mir-139-3p, |
| | mir-145, mir-150, mir-150*, mir-155, mir-17, mir-181a, mir-182, mir-183, mir-18a, |
| | mir-191, mir-196a, mir-196b, mir-19a, mir-19b, mir-200b, mir-200c, mir-203, mir- |
| | 204-5p, mir-20a, mir-20a-5p, mir-21, mir-210, mir-211, mir-221, mir-223, mir-224, |
| | mir-23a, mir-25, mir-27a, mir-29a, mir-301a, mir-31, mir-32, mir-320b, mir-326, mir- |
| | 424, mir-429, mir-494, mir-497, mir-499-5p, mir-592, mir-630, mir-720, mir-892a, |
| | mir-92, mir-92a, mir-93, mir-95, mir-96 |
| papillary thyroid | let-7e, mir-146b, mir-146b-5p, mir-151-5p, mir-155, mir-181a-1, mir-181a-2, mir- |
| carcinoma | 181b-1, mir-181b-2, mir-181c, mir-181d, mir-182, mir-183, mir-199b-5p, mir-21, mir- |
| | 221, mir-222, mir-339-5p, mir-34a |
| esophageal squamous | mir-100, mir-1179, mir-1290, mir-130b, mir-145, mir-16, mir-17, mir-183, mir-18a, |
| cell carcinoma | mir-19a, mir-19b, mir-208, mir-20a, mir-21, mir-218, mir-223, mir-25, mir-30a-5p, |
| | mir-31, mir-330-3p, mir-373, mir-9, mir-92a, mir-942 |
| gastric cancer | mir-100, mir-103, mir-106a, mir-106b, mir-107, mir-10a, mir-10b, mir-1259, mir- |
| | 125b, mir-126, mir-1274a, mir-1303, mir-130b*, mir-135a-5p, mir-135b, mir-138, |
| | mir-143, mir-146a, mir-147, mir-148a, mir-150, mir-17, mir-17-5p, mir-181a, mir- |
| | 181a-2*, mir-181a-5p, mir-181c, mir-183, mir-185, mir-18a, mir-191, mir-192, mir- |
| | 196a, mir-196a*, mir-196a-5p, mir-196b, mir-199a, mir-199a-3p, mir-199a-5p, mir- |
| | 19a, mir-19b, mir-200b, mir-20a, mir-21, mir-214, mir-215, mir-221, mir-221*, mir- |
| | 222, mir-223, mir-224, mir-23a, mir-23b, mir-25, mir-27a, mir-27b, mir-296-5p, mir- |
| | 301a, mir-302f, mir-337-3p, mir-340*, mir-34a, mir-362-3p, mir-370, mir-374a, mir- |
| | 377, mir-421, mir-425, mir-500, mir-520c-3p, mir-544, mir-575, mir-601, mir-616*, |
| | mir-650, mir-92, mir-98, mir-99a |
| renal cell carcinoma | mir-100, mir-1233, mir-1260b, mir-146a, mir-146b, mir-16, mir-193a-3p, mir-203a, |
| | mir-21, mir-210, mir-27a, mir-362, mir-572, mir-7 |
| esophageal cancer | mir-101, mir-10b, mir-130a, mir-141, mir-143, mir-146b, mir-15a, mir-183, mir-196b, |
| | mir-200a, mir-203, mir-205, mir-21, mir-210, mir-221, mir-27a, mir-28-3p, mir-31, |
| | mir-452, mir-96, mir-99b |
| bladder cancer | mir-103a-3p, mir-10b, mir-135a, mir-137, mir-141, mir-155, mir-17-5p, mir-182, mir- |
| | 182-5p, mir-183, mir-185, mir-19a, mir-203, mir-205, mir-210, mir-221, mir-222, mir- |
| | 223, mir-23a, mir-23b, mir-26b, mir-639, mir-96 |
| endometrial cancer | mir-106a, mir-145, mir-155, mir-182, mir-200b, mir-200c, mir-205, mir-21, mir-222- |
| | 3p, mir-25, mir-93 |
| ovarian cancer | mir-106a, mir-141, mir-148b, mir-181b, mir-182, mir-200a, mir-200c, mir-205, mir- |
| | 20a, mir-21, mir-210, mir-214, mir-221, mir-224-5p, mir-23b, mir-25, mir-26a, mir- |
| | 27a, mir-27b, mir-346, mir-378, mir-424, mir-503, mir-572, mir-9, mir-96 |
| glioma | mir-106b, mir-106b-5p, mir-10b, mir-125b, mir-132, mir-155, mir-17, mir-181a, mir- |
| | 182, mir-183, mir-193b, mir-19a, mir-19b, mir-20a, mir-210, mir-214, mir-221, mir- |
| | 222, mir-224, mir-23a, mir-24, mir-24-3p, mir-25, mir-26a, mir-27a-3p, mir-27b, mir- |
| | 30a-5p, mir-30e, mir-30e*, mir-328, mir-335, mir-33a, mir-372, mir-486, mir-494, |
| | mir-497, mir-566, mir-603, mir-650, mir-675, mir-9, mir-92b, mir-93, mir-96 |
| head and neck | mir-106b, mir-134, mir-16, mir-184, mir-196a, mir-21, mir-25, mir-30a-5p, mir-31, |
| squamous cell | mir-372, mir-93 |
| carcinoma | |
| hepatocellular | mir-106b, mir-10b, mir-122, mir-1228, mir-1269, mir-128a, mir-130a, mir-130b, mir- |
| carcinoma | 146a, mir-153, mir-155, mir-17-5p, mir-181a, mir-181a-1, mir-181a-2, mir-181b, mir- |
| | 181b-1, mir-181b-2, mir-181c, mir-181d, mir-182, mir-183, mir-184, mir-190b, mir- |
| | 191, mir-20a, mir-20b, mir-21, mir-210, mir-214, mir-215, mir-216a, mir-217, mir- |
| | 221, mir-222, mir-223, mir-224, mir-23a, mir-24, mir-25, mir-27a, mir-301a, mir-30d, |
| | mir-31, mir-3127, mir-32, mir-331-3p, mir-362-3p, mir-362-5p, mir-371-5p, mir-372, |
| | mir-373, mir-423, mir-429, mir-452, mir-483-3p, mir-483-5p, mir-485-3p, mir-490- |
| | 3p, mir-494, mir-495, mir-500, mir-501, mir-501-5p, mir-519d, mir-520g, mir-574-3p, |
| | mir-590-5p, mir-630, mir-650, mir-657, mir-664, mir-885-5p, mir-9, mir-92a, mir-96 |
| laryngeal carcinoma | mir-106b, mir-16, mir-21, mir-27a, mir-423-3p |
| medulloblastoma | mir-106b, mir-17, mir-18a, mir-19a, mir-19b, mir-20a, mir-30b, mir-30d, mir-92 |
| pituitary carcinoma | mir-106b, mir-122, mir-17-5p, mir-20a, mir-493 |
| cervical cancer | mir-10a, mir-155, mir-181a, mir-181b, mir-196a, mir-19a, mir-19b, mir-205, mir-20a, |
| | mir-21, mir-215, mir-224, mir-31, mir-494, mir-590-5p, mir-92a, mir-944 |
| pancreatic cancer | mir-10a, mir-10b, mir-132, mir-15a, mir-17-5p, mir-181a, mir-18a, mir-191, mir-196a, |
| | mir-21, mir-212, mir-214, mir-221, mir-222, mir-27a, mir-301a, mir-301a-3p, mir- |
| | 367, mir-424-5p, mir-7, mir-92, mir-99a |
| breast cancer | mir-10b, mir-125a, mir-135a, mir-140, mir-141, mir-142, mir-150, mir-155, mir-17, |
| | mir-17-5p, mir-181a, mir-181b, mir-182, mir-18a, mir-18b, mir-191, mir-196a, mir- |
| | 197, mir-19a, mir-19b, mir-200a, mir-200b, mir-200c, mir-203, mir-205, mir-20a, mir- |
| | 20b, mir-21, mir-217, mir-221, mir-222, mir-224, mir-23a, mir-24, mir-24-2-5p, mir- |
| | 24-3p, mir-27a, mir-29a, mir-29b-1, mir-29b-2, mir-29c, mir-373, mir-378, mir-423, |
| | mir-429, mir-495, mir-503, mir-510, mir-520c, mir-526b, mir-96 |
| glioblastoma | mir-10b, mir-125b, mir-127-3p, mir-148a, mir-18a, mir-196a, mir-196a-1, mir-196a-2, |
| | mir-196b, mir-21, mir-210, mir-210-3p, mir-223, mir-340, mir-576-5p, mir-626, mir- |
| | 92b |
| lung cancer | mir-10b, mir-135b, mir-150, mir-155, mir-17, mir-182, mir-183-3p, mir-18a, mir-197, |
| | mir-19a, mir-19b, mir-205, mir-20a, mir-21, mir-210, mir-24, mir-30d, mir-4423, mir- |
| | 5100, mir-570, mir-663, mir-7, mir-92a |
| nasopharyngeal | mir-10b, mir-144, mir-149, mir-155, mir-18a, mir-21, mir-214, mir-24, mir-421, mir- |
| carcinoma | 663, mir-744, mir-93 |
| non-small cell lung | mir-10b, mir-125a-5p, mir-1280, mir-136, mir-140, mir-141, mir-142-3p, mir-145, |
| cancer | mir-146a, mir-150, mir-18a, mir-196a, mir-19a, mir-200a, mir-200c, mir-205, mir- |
| | 205-3p, mir-205-5p, mir-21, mir-212, mir-22, mir-221, mir-222, mir-24, mir-25, mir- |
| | 29c, mir-31, mir-328, mir-330-3p, mir-339, mir-34a, mir-375, mir-494, mir-675-5p, |
| | mir-9, mir-92b, mir-93, mir-95 |
| oral cancer | mir-10b, mir-196a-1, mir-196a-2, mir-196b, mir-21 |
| pancreatic ductal | mir-10b, mir-186, mir-18a, mir-192, mir-194, mir-196a, mir-198, mir-203, mir-21, |
| adenocarcinoma | mir-212, mir-30b-5p, mir-31, mir-34a, mir-369-5p, mir-376a, mir-541 |
| renal clear cell | mir-122, mir-155, mir-210, mir-630 |
| carcinoma | |
| mantle cell lymphoma | mir-124a, mir-155, mir-17, mir-18a, mir-19a, mir-19b, mir-20a, mir-92a |
| acute myeloid | mir-125b, mir-126-5p, mir-128, mir-155, mir-29a, mir-32, mir-331, mir-370, mir-378 |
| leukemia | |
| follicular cancer | mir-125b |
| neuroblastoma | mir-125b, mir-15a, mir-15b, mir-16-1, mir-16-2, mir-18a, mir-195, mir-19a, mir-23a, |
| | mir-421, mir-92 |
| oral squamous cell | mir-125b, mir-126, mir-146a, mir-146b, mir-155, mir-181b, mir-196a-1, mir-196a-2, |
| carcinoma | mir-196b, mir-21, mir-221, mir-222, mir-24, mir-27b, mir-31, mir-345 |
| prostate cancer | mir-125b, mir-141, mir-153, mir-155, mir-181a-1, mir-181a-2, mir-181b, mir-181b-1, |
| | mir-181b-2, mir-181c, mir-181d, mir-182, mir-182-5p, mir-183, mir-18a, mir-204, |
| | mir-20a, mir-21, mir-221, mir-223-3p, mir-31, mir-429, mir-96 |
| mesenchymal cancer | mir-125b-1-3p, mir-182 |
| malignant melanoma | mir-126, mir-141, mir-15b, mir-17, mir-17-5p, mir-182, mir-18a, mir-193b, mir-200a, |
| | mir-200b, mir-200c, mir-20a, mir-21, mir-210, mir-214, mir-221, mir-222, mir-429, |
| | mir-455-5p, mir-532-5p, mir-638, mir-92a |
| acute lymphoblastic | mir-128 |
| leukemia | |
| osteosarcoma | mir-128, mir-151-3p, mir-17, mir-181a, mir-181b, mir-181c, mir-18a, mir-191, mir- |
| | 195-5p, mir-199a-3p, mir-19a, mir-19b, mir-20a, mir-21, mir-210, mir-214, mir-221, |
| | mir-27a, mir-300, mir-320a, mir-374a-5p, mir-802, mir-9, mir-92a |
| colon cancer | mir-1290, mir-145, mir-155, mir-181a, mir-18a, mir-200c, mir-31, mir-675 |
| liver cancer | mir-1301, mir-155, mir-21, mir-221, mir-27a, mir-525-3p |
| cervical carcinoma | mir-133b, mir-21, mir-25, mir-373 |
| squamous carcinoma | mir-137, mir-155, mir-184, mir-196a, mir-203, mir-21, mir-221, mir-27a, mir-34a |
| chordoma | mir-140-3p, mir-148a |
| clear cell renal cell | mir-142-5p, mir-155, mir-21-5p |
| cancer | |
| malt lymphoma | mir-142-5p, mir-155 |
| anaplastic thyroid | mir-146b, mir-221, mir-222 |
| carcinoma | |
| follicular thyroid | mir-146b, mir-183, mir-197, mir-221, mir-346 |
| carcinoma | |
| primary thyroid | mir-146b |
| lymphoma | |
| ovarian carcinoma | mir-148b, mir-182 |
| adult t-cell leukemia | mir-150 |
| chronic lymphocytic | mir-150, mir-155 |
| leukemia | |
| lung adenocarcinoma | mir-150, mir-155, mir-31 |
| anaplastic large-cell | mir-155 |
| lymphoma | |
| cutaneous t-cell | mir-155 |
| lymphoma | |
| diffuse large B-cell | mir-155, mir-21 |
| lymphoma | |
| gallbladder carcinoma | mir-155, mir-182 |
| rectal cancer | mir-155, mir-200c, mir-21-5p, mir-34a |
| b-cell lymphoma | mir-17, mir-18a, mir-19a, mir-19b, mir-20a, mir-92a |
| breast carcinoma | mir-17, mir-18a, mir-19a, mir-19b, mir-20a, mir-24, mir-92a |
| cholangiocarcinoma | mir-17, mir-18a, mir-19a, mir-19b, mir-20a, mir-21, mir-26a, mir-92a |
| colorectal carcinoma | mir-17, mir-182, mir-191, mir-21, mir-95 |
| nasopharyngeal cancer | mir-17, mir-20a |
| acute promyelocytic | mir-181a, mir-181b, mir-92a |
| leukemia | |
| retinoblastoma | mir-181b, mir-21 |
| colorectal | mir-182 |
| adenocarcinoma | |
| kidney cancer | mir-183, mir-21, mir-210, mir-223 |
| medullary thyroid | mir-183 |
| carcinoma | |
| esophageal | mir-196a, mir-199a-3p, mir-199a-5p, mir-199b-3p, mir-200a, mir-223 |
| adenocarcinoma | |
| gastrointestinal stromal | mir-196a |
| tumor | |
| hypopharyngeal cancer | mir-203 |
| pancreatic | mir-203, mir-301a |
| adenocarcinoma | |
| cervical squamous cell | mir-205 |
| carcinoma | |
| adrenal cortical | mir-21, mir-210, mir-483-3p, mir-483-5p |
| carcinoma | |
| head and neck cancer | mir-21 |
| hypopharyngeal | mir-21 |
| squamous cell | |
| carcinoma | |
| laryngeal squamous | mir-21, mir-9, mir-93 |
| cell carcinoma | |
| multiple myeloma | mir-21 |
| colon carcinoma | mir-221, mir-23a |
| thyroid carcinoma | mir-221, mir-222 |
| meningioma | mir-224, mir-335 |
| gastric | mir-23a, mir-27a, mir-373 |
| adenocarcinoma | |
| laryngeal cancer | mir-23a |
| small cell lung cancer | mir-25 |
| pancreatic carcinoma | mir-301b |
| oral carcinoma | mir-31 |
| astrocytoma | mir-335 |
| epithelial ovarian | mir-372, mir-373 |
| cancer | |
| chronic myelogenous | mir-424, mir-96 |
| leukemia | |
| hepatoblastoma | mir-492 |

TABLE 14
Tumor suppressor miRs that are downregulated in specific cancer types

| Cancer | miRNA |
|---|---|
| Bladder | mir-1; mir-101; mir-1180; mir-1236; mir-124-3p; mir-125b; mir-126; mir- |
| | 1280; mir-133a; mir-133b; mir-141; mir-143; mir-144; mir-145; mir-155; |
| | mir-16; mir-18a; mir-192; mir-195; mir-200a; mir-200b; mir-200c; mir-203; |
| | mir-205; mir-214; mir-218; mir-23b; mir-26a; mir-29c; mir-320c; mir-34a; |
| | mir-370; mir-409-3p; mir-429; mir-451; mir-490-5p; mir-493; mir-576-3p; |
| | mir-99a |
| Brain | let-7g-5p; mir-100; mir-101; mir-106a; mir-124; mir-124a; mir-125a; mir- |
| (Astrocytoma, | 125a-5p; mir-125b; mir-127-3p; mir-128; mir-129; mir-136; mir-137; mir- |
| Glioblastoma, | 139-5p; mir-142-3p; mir-143; mir-145; mir-146b-5p; mir-149; mir-152; |
| Glioma) | mir-153; mir-195; mir-21; mir-212-3p; mir-219-5p; mir-222; mir-29b; mir- |
| | 31; mir-3189-3p; mir-320; mir-320a; mir-326; mir-330; mir-331-3p; mir- |
| | 340; mir-342; mir-34a; mir-376a; mir-449a; mir-483-5p; mir-503; mir-577; |
| | mir-663; mir-7; mir-7-5p; mir-873; let-7a; let-7f; mir-107; mir-122; mir- |
| | 124-5p; mir-139; mir-146a; mir-146b; mir-15b; mir-16; mir-181a; mir- |
| | 181a-1; mir-181a-2; mir-181b; mir-181b-1; mir-181b-2; mir-181c; mir- |
| | 181d; mir-184; mir-185; mir-199a-3p; mir-200a; mir-200b; mir-203; mir- |
| | 204; mir-205; mir-218; mir-23b; mir-26b; mir-27a; mir-29c; mir-328; mir- |
| | 34c-3p; mir-34c-5p; mir-375; mir-383; mir-451; mir-452; mir-495; mir-584; |
| | mir-622; mir-656; mir-98; mir-124-3p; mir-181b-5p; mir-200b; mir-3189-3p |
| Breast | mir-193b; let-7a; let-7a-1; let-7a-2; let-7a-3; let-7b; let-7c; let-7d; let-7e; let- |
| | 7f-1; let-7f-2; let-7g; let-7i; mir-100; mir-107; mir-10a; mir-10b; mir-122; |
| | mir-124; mir-1258; mir-125a-5p; mir-125b; mir-126; mir-127; mir-129; |
| | mir-130a; mir-132; mir-133a; mir-143; mir-145; mir-146a; mir-146b; mir- |
| | 147; mir-148a; mir-149; mir-152; mir-153; mir-15a; mir-16; mir-17-5p; mir- |
| | 181a; mir-1826; mir-183; mir-185; mir-191; mir-193a-3p; mir-195; mir- |
| | 199b-5p; mir-19a-3p; mir-200a; mir-200b; mir-200c; mir-205; mir-206; |
| | mir-211; mir-216b; mir-218; mir-22; mir-26a; mir-26b; mir-300; mir-30a; |
| | mir-31; mir-335; mir-339-5p; mir-33b; mir-34a; mir-34b; mir-34c; mir- |
| | 374a; mir-379; mir-381; mir-383; mir-425; mir-429; mir-450b-3p; mir-494; |
| | mir-495; mir-497; mir-502-5p; mir-517a; mir-574-3p; mir-638; mir-7; mir- |
| | 720; mir-873; mir-874; mir-92a; mir-98; mir-99a; mmu-mir-290-3p; mmu- |
| | mir-290-5p |
| Cervical | mir-143; mir-145; mir-17-5p; mir-203; mir-214; mir-218; mir-335; mir-342- |
| | 3p; mir-372; mir-424; mir-491-5p; mir-497; mir-7; mir-99a; mir-99b; mir- |
| | 100; mir-101; mir-15a; mir-16; mir-34a; mir-886-5p; mir-106a; mir-124; |
| | mir-148a; mir-29a; mir-375 |
| Colon/Colorectal | let-7a-1; let-7a-2; let-7a-3; let-7b; let-7c; let-7d; let-7e; let-7f-1; let-7f-2; let- |
| | 7g; let-7i; mir-100; mir-101; mir-126; mir-142-3p; mir-143; mir-145; mir- |
| | 192; mir-200c; mir-21; mir-214; mir-215; mir-22; mir-25; mir-302a; mir- |
| | 320; mir-320a; mir-34a; mir-34c; mir-365; mir-373; mir-424; mir-429; mir- |
| | 455; mir-484; mir-502; mir-503; mir-93; mir-98; mir-186; mir-30a-5p; mir- |
| | 627; let-7a; mir-1; mir-124; mir-125a; mir-129; mir-1295b-3p; mir-1307; |
| | mir-130b; mir-132; mir-133a; mir-133b; mir-137; mir-138; mir-139; mir- |
| | 139-5p; mir-140-5p; mir-148a; mir-148b; mir-149; mir-150-5p; mir-154; |
| | mir-15a; mir-15b; mir-16; mir-18a; mir-191; mir-193a-5p; mir-194; mir- |
| | 195; mir-196a; mir-198; mir-199a-5p; mir-203; mir-204-5p; mir-206; mir- |
| | 212; mir-218; mir-224; mir-24-3p; mir-26b; mir-27a; mir-28-3p; mir-28-5p; |
| | mir-29b; mir-30a-3p; mir-30b; mir-328; mir-338-3p; mir-342; mir-345; mir- |
| | 34a-5p; mir-361-5p; mir-375; mir-378; mir-378a-3p; mir-378a-5p; mir-409- |
| | 3p; mir-422a; mir-4487; mir-483; mir-497; mir-498; mir-518a-3p; mir-551a; |
| | mir-574-5p; mir-625; mir-638; mir-7; mir-96-5p; mir-202-3p; mir-30a; mir- |
| | 451 |
| Endometrial | mir-101; mir-130a; mir-130b; mir-134; mir-143; mir-145; mir-152; mir-205; |
| | mir-223; mir-301a; mir-301b; mir-30c; mir-34a; mir-34c; mir-424; mir- |
| | 449a; mir-543; mir-34b |
| Hematologic | mir-125b; mir-138; mir-15a; mir-15b; mir-16; mir-16-1; mir-16-1-3p; mir- |
| (Leukemia, | 16-2; mir-181a; mir-181b; mir-195; mir-223; mir-29b; mir-34b; mir-34c; |
| Lymphoma, | mir-424; mir-10a; mir-146a; mir-150; mir-151; mir-155; mir-2278; mir-26a; |
| Myeloma) | mir-30e; mir-31; mir-326; mir-564; mir-27a; let-7b; mir-124a; mir-142-3p; |
| | let-7c; mir-17; mir-20a; mir-29a; mir-30c; mir-720; mir-107; mir-342; mir- |
| | 34a; mir-202; mir-142-5p; mir-29c; mir-145; mir-193b; mir-199a; mir-214; |
| | mir-22; mir-137; mir-197 |
| Kidney | mir-1; mir-145; mir-1826; mir-199a; mir-199a-3p; mir-203; mir-205; mir- |
| | 497; mir-508-3p; mir-509-3p; let-7a; let-7d; mir-106a *; mir-126; mir-1285; |
| | mir-129-3p; mir-1291; mir-133a; mir-135a; mir-138; mir-141; mir-143; mir- |
| | 182-5p; mir-200a; mir-218; mir-28-5p; mir-30a; mir-30c; mir-30d; mir-34a; |
| | mir-378; mir-429; mir-509-5p; mir-646; mir-133b; let-7b; let-7c; mir-200c; |
| | mir-204; mir-335; mir-377; mir-506 |
| Liver | mir-137; mir-138; mir-139; mir-139-5p; mir-140-5p; mir-141; mir-142-3p; |
| (Hepatocellular | mir-143; mir-144; mir-145; mir-146a; mir-148a; mir-148b; mir-150-5p; mir- |
| Carcinoma) | 15b; mir-16; mir-181a-5p; mir-185; mir-188-5p; mir-193b; mir-195; mir- |
| | 195-5p; mir-197; mir-198; mir-199a; mir-199a-5p; mir-199b; mir-199b-5p; |
| | mir-200a; mir-200b; mir-200c; mir-202; mir-203; mir-204-3p; mir-205; mir- |
| | 206; mir-20a; mir-21; mir-21-3p; mir-211; mir-212; mir-214; mir-217; mir- |
| | 218; mir-219-5p; mir-22; mir-223; mir-26a; mir-26b; mir-29a; mir-29b-1; |
| | mir-29b-2; mir-29c; mir-302b; mir-302c; mir-30a; mir-30a-3p; mir-335; |
| | mir-338-3p; mir-33a; mir-34a; mir-34b; mir-365; mir-370; mir-372; mir- |
| | 375; mir-376a; mir-377; mir-422a; mir-424; mir-424-5p; mir-433; mir- |
| | 4458; mir-448; mir-450a; mir-451; mir-485-5p; mir-486-5p; mir-497; mir- |
| | 503; mir-506; mir-519d; mir-520a; mir-520b; mir-520c-3p; mir-582-5p; |
| | mir-590-5p; mir-610; mir-612; mir-625; mir-637; mir-675; mir-7; mir-877; |
| | mir-940; mir-941; mir-98; mir-99a; mir-132; mir-31 |
| Lung | mir-1297; mir-141; mir-145; mir-16; mir-200a; mir-200b; mir-200c; mir- |
| | 29b; mir-381; mir-409-3p; mir-429; mir-451; mir-511; mir-99a; let-7a-1; |
| | let-7a-2; let-7a-3; let-7b; let-7c; let-7d; let-7e; let-7f-1; let-7f-2; let-7g; let- |
| | 7i; mir-1; mir-101; mir-133b; mir-138; mir-142-5p; mir-144; mir-1469; mir- |
| | 146a; mir-153; mir-15a; mir-15b; mir-16-1; mir-16-2; mir-182; mir-192; |
| | mir-193a-3p; mir-194; mir-195; mir-198; mir-203; mir-217; mir-218; mir- |
| | 22; mir-223; mir-26a; mir-26b; mir-29c; mir-33a; mir-34a; mir-34b; mir- |
| | 34c; mir-365; mir-449a; mir-449b; mir-486-5p; mir-545; mir-610; mir-614; |
| | mir-630; mir-660; mir-7515; mir-9500; mir-98; mir-99b; mir-133a; let-7a; |
| | mir-100; mir-106a; mir-107; mir-124; mir-125a-3p; mir-125a-5p; mir-126; |
| | mir-126 *; mir-129; mir-137; mir-140; mir-143; mir-146b; mir-148a; mir- |
| | 148b; mir-149; mir-152; mir-154; mir-155; mir-17-5p; mir-181a-1; mir- |
| | 181a-2; mir-181b; mir-181b-1; mir-181b-2; mir-181c; mir-181d; mir-184; |
| | mir-186; mir-193b; mir-199a; mir-204; mir-212; mir-221; mir-224; mir-27a; |
| | mir-27b; mir-29a; mir-30a; mir-30b; mir-30c; mir-30d; mir-30d-5p; mir- |
| | 30e-5p; mir-32; mir-335; mir-338-3p; mir-340; mir-342-3p; mir-361-3p; |
| | mir-373; mir-375; mir-4500; mir-4782-3p; mir-497; mir-503; mir-512-3p; |
| | mir-520a-3p; mir-526b; mir-625 *; mir-96 |
| Melanoma | let-7b; mir-101; mir-125b; mir-1280; mir-143; mir-146a; mir-146b; mir- |
| | 155; mir-17; mir-184; mir-185; mir-18b; mir-193b; mir-200c; mir-203; mir- |
| | 204; mir-205; mir-206; mir-20a; mir-211; mir-218; mir-26a; mir-31; mir- |
| | 33a; mir-34a; mir-34c; mir-376a; mir-376c; mir-573; mir-7-5p; mir-9; mir- |
| | 98 |
| Oral Cancer | let-7d; mir-218; mir-34a; mir-375; mir-494; mir-100; mir-124; mir-1250; |
| | mir-125b; mir-126; mir-1271; mir-136; mir-138; mir-145; mir-147; mir- |
| | 148a; mir-181a; mir-206; mir-220a; mir-26a; mir-26b; mir-29a; mir-32; mir- |
| | 323-5p; mir-329; mir-338; mir-370; mir-410; mir-429; mir-433; mir-499a- |
| | 5p; mir-503; mir-506; mir-632; mir-646; mir-668; mir-877; mir-9 |
| Ovarian | let-7i; mir-100; mir-124; mir-125b; mir-129-5p; mir-130b; mir-133a; mir- |
| | 137; mir-138; mir-141; mir-145; mir-148a; mir-152; mir-153; mir-155; mir- |
| | 199a; mir-200a; mir-200b; mir-200c; mir-212; mir-335; mir-34a; mir-34b; |
| | mir-34c; mir-409-3p; mir-411; mir-429; mir-432; mir-449a; mir-494; mir- |
| | 497; mir-498; mir-519d; mir-655; mir-9; mir-98; mir-101; mir-532-5p; mir- |
| | 124a; mir-192; mir-193a; mir-7 |
| Pancreatic | mir-101; mir-1181; mir-124; mir-1247; mir-133a; mir-141; mir-145; mir- |
| | 146a; mir-148a; mir-148b; mir-150 *; mir-150-5p; mir-152; mir-15a; mir- |
| | 198; mir-203; mir-214; mir-216a; mir-29c; mir-335; mir-34a; mir-34b; mir- |
| | 34c; mir-373; mir-375; mir-410; mir-497; mir-615-5p; mir-630; mir-96; |
| | mir-132; let-7a; let-7a-1; let-7a-2; let-7a-3; let-7b; let-7c; let-7d; let-7e; let- |
| | 7f-1; let-7f-2; let-7g; let-7i; mir-126; mir-135a; mir-143; mir-144; mir-150; |
| | mir-16; mir-200a; mir-200b; mir-200c; mir-217; mir-218; mir-337; mir-494; |
| | mir-98 |
| Prostate | let-7a-3p; let-7c; mir-100; mir-101; mir-105; mir-124; mir-128; mir-1296; |
| | mir-130b; mir-133a-1; mir-133a-2; mir-133b; mir-135a; mir-143; mir-145; |
| | mir-146a; mir-154; mir-15a; mir-187; mir-188-5p; mir-199b; mir-200b; mir- |
| | 203; mir-205; mir-212; mir-218; mir-221; mir-224; mir-23a; mir-23b; mir- |
| | 25; mir-26a; mir-26b; mir-29b; mir-302a; mir-30a; mir-30b; mir-30c-1; mir- |
| | 30c-2; mir-30d; mir-30e; mir-31; mir-330; mir-331-3p; mir-34a; mir-34b; |
| | mir-34c; mir-374b; mir-449a; mir-4723-5p; mir-497; mir-628-5p; mir-642a- |
| | 5p; mir-765; mir-940 |
| Retinoblastoma | mir-101; mir-183; mir-204; mir-34a; mir-365b-3p; mir-486-3p; mir-532-5p |

1. A recombinant herpesvirus, wherein the viral genome of the recombinant herpesvirus:
(a) comprises one or more transgenes, optionally wherein the open reading frame(s) (ORFs) of the transgene(s) have a G/C content of at least 60%, at least 61%, at least 62%, at least 63%, or at least 64%;
(b) comprises one or more miRNA target sequences;
(c) comprises a polynucleotide encoding a retargeting domain;
(d) comprises a UL30 viral gene encoding a DNA polymerase catalytic subunit (DPCS) and a UL23 viral gene encoding a thymidine kinase (TK), wherein the DPCS comprises a mutation, and wherein the TK comprises a mutation;
(e) encodes a first gB and/or a second gB, wherein the first gB comprises a syncytial mutation, and wherein the second gB comprises no syncytial mutation;
(f) encodes a first gK and/or a second gK, wherein the first gK comprises a syncytial mutation, and wherein the second gK comprises no syncytial mutation;
(g) encodes a first gH and/or a second gH, wherein the first gH comprises a syncytial mutation, and wherein the second gH comprises no syncytial mutation;
(h) encodes a first UL20 and/or a second UL20, wherein the first UL20 comprises a syncytial mutation, and wherein the second UL20 comprises no syncytial mutation;
and/or
(i) encodes a first UL24 and/or a second UL24, wherein the first UL24 comprises a syncytial mutation, and wherein the second UL24 comprises no syncytial mutation.

2. The recombinant herpesvirus of claim 1, wherein the viral genome of the recombinant herpesvirus comprises the one or more transgenes, wherein the one or more transgenes encode one or more payload proteins selected from 15-hydroxyprostaglandin dehydrogenase [NAD(+)] (HPGD), adenosine deaminase 2 (ADA2), hyaluronidase-1 (HYAL1), hemotaxis inhibitory protein (CHP), C-C motif chemokine 21 (CCL21), interleukin-12 (IL-12), a CD47 antagonist, a transforming growth factor beta (TGFβ) antagonist, a programmed death-1 (PD1) antagonist, a triggering receptor expressed on myeloid cells-2 (TREM2) antagonist, a biomolecule comprising chlorotoxin (CTX), or any combinations thereof.

3. The recombinant herpesvirus of claim 2, wherein the one or more payload proteins comprise or consist of IL-12, a PD1 antagonist, and a TREM2 antagonist.

4. The recombinant herpesvirus of claim 3, wherein the one or more payload proteins comprise HPGD.

5. The recombinant herpesvirus of claim 3 or 4, wherein the one or more payload proteins comprise a biomolecule comprising CTX.

6. The recombinant herpesvirus of claim 2, wherein the one or more payload proteins comprise or consist of one of the combinations of payload proteins listed in Tables 4-7.

7. The recombinant herpesvirus of any one of claims 2-6, wherein the one or more payload proteins comprise HPGD.

8. The recombinant herpesvirus of any one of claims 2-7, wherein the one or more payload proteins comprise ADA2.

9. The recombinant herpesvirus of any one of claims 2-8, wherein the one or more payload proteins comprise HYAL1.

10. The recombinant herpesvirus of any one of claims 2-9, wherein the one or more payload proteins comprise CHP.

11. The recombinant herpesvirus of any one of claims 2-10, wherein the one or more payload proteins comprise CCL21.

12. The recombinant herpesvirus of any one of claims 2-11, wherein the one or more payload proteins comprise IL-12.

13. The recombinant herpesvirus of any one of claims 2-12, wherein the one or more payload proteins comprise the CD47 antagonist.

14. The recombinant herpesvirus of any one of claims 2-13, wherein the one or more payload proteins comprise the TGFβ antagonist.

15. The recombinant herpesvirus of any one of claims 2-14, wherein the one or more payload proteins comprise the PD1 antagonist.

16. The recombinant herpesvirus of any one of claims 2-15, wherein the one or more payload proteins comprise the TREM2 antagonist.

17. The recombinant herpesvirus of any one of claims 2-16, wherein the antagonist comprises an antibody or antigen binding fragment thereof.

18. The recombinant herpesvirus of any one of claims 2-17, wherein the one or more payload proteins comprise the biomolecule comprising CTX.

19. The recombinant herpesvirus of claim 5 or 18, wherein the biomolecule comprising CTX further comprises a T-cell engager moiety specifically binding to a protein expressed on the surface of the T-cell.

20. The recombinant herpesvirus of claim 19, wherein the protein expressed on the surface of the T-cell is CD3.

21. The recombinant herpesvirus of claim 20, wherein the T-cell engager moiety comprises an amino acid sequence at least 90%, at least 95%, at least 97%, at least 98%, at least 99%, or 100% identical to SEQ ID NO: 914.

22. The recombinant herpesvirus of any one of claims 18-21, wherein the CTX comprises or consists of an amino acid sequence at least 95% identical to SEQ ID NO: 913.

23. The recombinant herpesvirus of any one of claims 2-22, wherein:
(i) the HPGD comprises an amino acid sequence at least 90%, at least 95%, at least 97%, at least 98%, at least 99%, or 100% identical to SEQ ID NO: 875;
(ii) the ADA2 comprises an amino acid sequence at least 90%, at least 95%, at least 97%, at least 98%, at least 99%, or 100% identical to SEQ ID NO: 877;
(iii) the HYAL1 comprises an amino acid sequence at least 90%, at least 95%, at least 97%, at least 98%, at least 99%, or 100% identical to SEQ ID NO: 878;
(iv) the CHP comprises an amino acid sequence at least 90%, at least 95%, at least 97%, at least 98%, at least 99%, or 100% identical to SEQ ID NO: 880;
(v) the CCL21 comprises an amino acid sequence at least 90%, at least 95%, at least 97%, at least 98%, at least 99%, or 100% identical to SEQ ID NO: 881;
(vi) the IL-12 comprises a subunit alpha comprising an amino acid sequence at least 90%, at least 95%, at least 97%, at least 98%, at least 99%, or 100% identical to SEQ ID NO: 883 and a subunit beta comprising an amino acid sequence at least 90%, at least 95%, at least 97%, at least 98%, at least 99%, or 100% identical to SEQ ID NO: 884;
(vii) the CD47 antagonist comprises VHH CDR1 of SEQ ID NO: 895, VHH CDR2 of SEQ ID NO: 896, VHH CDR3 of SEQ ID NO: 897, and/or an amino acid sequence at least 90%, at least 95%, at least 97%, at least 98%, at least 99%, or 100% identical to SEQ ID NO: 887 or 888;
(viii) the TGFβ antagonist comprises a heavy chain variable domain (VH) comprising CDR1 of SEQ ID NO: 898, CDR2 of SEQ ID NO: 899, and CDR3 of SEQ ID NO: 900, and/or a light chain variable domain (VL) comprising CDR1 of SEQ ID NO: 901, CDR2 of SEQ ID NO: 902, and CDR3 of SEQ ID NO: 903; optionally wherein the TGFβ antagonist comprises an amino acid sequence at least 90%, at least 95%, at least 97%, at least 98%, at least 99%, or 100% identical to SEQ ID NO: 889 or 890;
(ix) the PD1 antagonist comprises VHH CDR1 of SEQ ID NO: 904, VHH CDR2 of SEQ ID NO: 905, VHH CDR3 of SEQ ID NO: 906, and/or an amino acid sequence at least 90%, at least 95%, at least 97%, at least 98%, at least 99%, or 100% identical to SEQ ID NO: 891 or 892; and/or
(x) the biomolecule comprising CTX comprises an amino acid sequence at least 90%, at least 95%, at least 97%, at least 98%, at least 99%, or 100% identical to SEQ ID NO: 915 or 916.

24. The recombinant herpesvirus of any one of claims 1-23, wherein the ORF of at least one of the transgene(s) has the G/C content of at least 60%, at least 61%, at least 62%, at least 63%, or at least 64%.

25. The recombinant herpesvirus of claim 24, wherein the ORFs of all of the transgene(s) have the G/C content of at least 60%, at least 61%, at least 62%, at least 63%, or at least 64%.

26. The recombinant herpesvirus of claim 24, wherein the ORFs of the transgene(s) encoding IL-12, the PD1 antagonist, the TREM2 antagonist, HPGD, and/or the biomolecule comprising CTX have the G/C content of at least 60%, at least 61%, at least 62%, at least 63%, or at least 64%.

27. The recombinant herpesvirus of any one of claims 24-26, wherein the expression of a payload protein encoded by the ORF of the transgene is at least 2-fold, at least 3-fold, at least 5-fold, at least 8-fold, or at least 10-fold higher than the expression of the payload protein encoded by a control ORF having a G/C content of about 52% in a control recombinant herpesvirus; optionally wherein the control ORF is codon optimized based on the codon usage of Homo sapiens.

28. The recombinant herpesvirus of any one of claims 24-27, wherein the ORF(s) of the transgene(s) are codon optimized based on the codon usage of Anaeromyxobacter dehalogenans.

29. The recombinant herpesvirus of any one of claims 24-28, wherein the transgene(s) encode an antibody or antigen binding fragment thereof.

30. The recombinant herpesvirus of claim 29, wherein the antibody or antigen binding fragment thereof comprises a heavy chain variable domain (VH) and a light chain variable domain (VL).

31. The recombinant herpesvirus of claim 29 or 30, wherein the antibody or antigen binding fragment thereof comprises a VHH domain derived from a single domain antibody (sdAb).

32. The recombinant herpesvirus of claim 30 or 31, wherein the antibody or antigen binding fragment thereof comprises an IgG-Fc, optionally wherein the IgG is IgG1.

33. The recombinant herpesvirus of any one of claims 23 and 29-32, wherein the transgene encoding the PD1 antagonist comprises a polynucleotide sequence at least 90%, at least 95%, at least 97%, at least 98%, at least 99%, or 100% identical to SEQ ID NO: 937.

34. The recombinant herpesvirus of any one of claims 23 and 29-33, wherein the transgene encoding the biomolecule comprising CTX comprises a polynucleotide sequence at least 90%, at least 95%, at least 97%, at least 98%, at least 99%, or 100% identical to SEQ ID NO: 940 or 941.

35. The recombinant herpesvirus of any one of claims 24-34, comprising the transgene(s) encoding a cytokine, a chemokine, a receptor, a receptor ligand, an enzyme, and/or a reporter protein.

36. The recombinant herpesvirus of claim 23 or 35, wherein the transgene encoding IL-12 comprise a polynucleotide sequence at least 90%, at least 95%, at least 97%, at least 98%, at least 99%, or 100% identical to SEQ ID NO: 936.

37. The recombinant herpesvirus of any one of claims 23 and 35-36, wherein the transgene encoding HPGD comprises a polynucleotide sequence at least 90%, at least 95%, at least 97%, at least 98%, at least 99%, or 100% identical to SEQ ID NO: 939.

38. The recombinant herpesvirus of any one of claims 1-37, comprising the miRNA target sequences for miR-34b-5p, miR-34b-3p, miR-34c-5p, miR-122-5p, miR-124-3p, miR-128T, miR-129-5p, miR-129-2-3p, miR-132-3p, miR-137-3p, miR-145-5p, or any combination thereof.

39. The recombinant herpesvirus of claim 38, comprising the miRNA target sequences for miR-34b-5p, miR-34c-5p, miR-122-5p, miR-124-3p, miR-128T, miR-129-2-3p, miR-132-3p, miR-137-3p, miR-145-5p, or any combination thereof.

40. The recombinant herpesvirus of claim 38, comprising the miRNA target sequences for miR-34b-5p, miR-34c-5p, miR-122-5p, miR-124-3p, miR-128T, miR-129-2-3p, miR-132-3p, miR-137-3p, and miR-145-5p.

41. The recombinant herpesvirus of any one of claims 38-40, comprising:
(a) one or more miRNA target sequences for miR-122-5p;
(b) one or more miRNA target sequences for miR-145-5p;
(c) one or more miRNA target sequences for miR-124-3p, miR-128T, miR-137-3p, or any combination thereof;
(d) one or more miRNA target sequences for miR-34b-5p, miR-34c-5p, or any combination thereof; and
(e) one or more miRNA target sequences for miR-129-2-3p, miR-132-3p, or any combination thereof.

42. The recombinant herpesvirus of any one of claims 38-41, comprising a first miR-TS cassette inserted into a first viral gene, wherein the first miR-TS cassette comprises one or more miRNA target sequences for each of miR-34c-5p, miR-124-3p, miR-129-2-3p, and miR-132-3p.

43. The recombinant herpesvirus of claim 42, wherein the miRNA target sequences in the first miR-TS cassette are arranged as (34c-5p)-(124-3p)-(132-3p)-(129-2-3p)-(34c-5p)-(124-3p)-(129-2-3p)-(132-3p)-(124-3p)-(129-2-3p)-(132-3p)-(34c-5p).

44. The recombinant herpesvirus of claim 42 or 43, wherein the first miR-TS cassette comprises a nucleic acid sequence at least 90%, at least 95%, at least 96%, at least 97%, at least 98%, at least 99%, or 100% identical to SEQ ID NO: 859.

45. The recombinant herpesvirus of any one of claims 42-44, wherein the first viral gene is ICP8.

46. The recombinant herpesvirus of any one of claims 38-45, comprising a second miR-TS cassette inserted into a second viral gene, wherein the second miR-TS cassette comprises one or more miRNA target sequences for each of miR-122-5p, miR-124-3p, miR-128T, and miR-137-3p.

47. The recombinant herpesvirus of claim 46, wherein the miRNA target sequences in the second miR-TS cassette are arranged as (137-3p)-(128T)-(122-5p)-(124-3p)-(122-5p)-(128T)-(137-3p)-(124-3p)-(128T)-(137-3p)-(124-3p)-(122-5p).

48. The recombinant herpesvirus of claim 46 or 47, wherein the second miR-TS cassette comprises a nucleic acid sequence at least 90%, at least 95%, at least 96%, at least 97%, at least 98%, at least 99%, or 100% identical to SEQ ID NO: 858.

49. The recombinant herpesvirus of any one of claims 46-48, wherein the second viral gene is ICP4.

50. The recombinant herpesvirus of claim 49, comprising the second miR-TS cassette in both ICP4 viral genes of the viral genome.

51. The recombinant herpesvirus of any one of claims 1-50, comprising one or more miRNA target sequences in both ICP4 viral genes of the viral genome; optionally wherein the miRNA target sequences are the same in both said ICP4 viral genes.

52. The recombinant herpesvirus of any one of claims 38-51, comprising a third miR-TS cassette inserted into a third viral gene, wherein the third miR-TS cassette comprises one or more miRNA target sequences for each of miR-34c-5p, miR-124-3p, miR-128T, and miR-137-3p.

53. The recombinant herpesvirus of claim 52, wherein the miRNA target sequences in the third miR-TS cassette are arranged as (124-3p)-(128T)-(34c-5p)-(137-3p)-(128T)-(34c-5p)-(137-3p)-(124-3p)-(128T)-(137-3p)-(124-3p)-(34c-5p).

54. The recombinant herpesvirus of claim 52 or 53, wherein the third miR-TS cassette comprises a nucleic acid sequence at least 90%, at least 95%, at least 96%, at least 97%, at least 98%, at least 99%, or 100% identical to SEQ ID NO: 873.

55. The recombinant herpesvirus of any one of claims 38-51, comprising a third miR-TS cassette inserted into a third viral gene, wherein the third miR-TS cassette comprises one or more miRNA target sequences for each of miR-34b-3p, miR-34c-5p, miR-128T, miR-137-3p.

56. The recombinant herpesvirus of any one of claims 52-55, wherein the third viral gene is ICP27.

57. The recombinant herpesvirus of any one of claims 38-56, comprising a fourth miR-TS cassette inserted into a fourth viral gene, wherein:
(i) the fourth miR-TS cassette comprises one or more miRNA target sequences for each of miR-34b-5p, miR-34c-5p, miR-129-5p, and miR-145-5p;
(ii) the fourth miR-TS cassette comprises one or more miRNA target sequences for each of miR-34b-5p, miR-34c-5p, miR-132-3p, and miR-145-5p; or
(iii) the fourth miR-TS cassette comprises one or more miRNA target sequences for each of miR-34b-3p, miR-34c-5p, miR-132-3p, and miR-145-5p.

58. The recombinant herpesvirus of any one of claims 38-56, comprising a fourth miR-TS cassette inserted into a fourth viral gene, wherein the fourth miR-TS cassette comprises one or more miRNA target sequences for each of miR-34b-5p, miR-34c-5p, miR-132-3p, and miR-145-5p.

59. The recombinant herpesvirus of claim 58, wherein the miRNA target sequences in the fourth miR-TS cassette are arranged as (145-5p)-(34b-5p)-(132-3p)-(34c-5p)-(145-5p)-(34c-5p)-(34b-5p)-(132-3p)-(34b-5p)-(145-5p)-(132-3p)-(34c-5p).

60. The recombinant herpesvirus of claim 58 or 59, wherein the fourth miR-TS cassette comprises a nucleic acid sequence at least 90%, at least 95%, at least 96%, at least 97%, at least 98%, at least 99%, or 100% identical to SEQ ID NO: 874.

61. The recombinant herpesvirus of any one of claims 57-60, wherein the fourth viral gene is UL8.

62. The recombinant herpesvirus of any one of claims 42-61, wherein each of the miR-TS cassettes comprises at least 2, at least 3, or at least 4 copies of each of the miRNA target sequences.

63. The recombinant herpesvirus of any one of claims 42-61, wherein each of the miR-TS cassettes comprises 3 copies of each of the miRNA target sequences.

64. The recombinant herpesvirus of any one of claims 38-63, wherein the replication of the recombinant HSV is reduced in a non-cancerous cell compared to the replication of the recombinant HSV in a cancerous cell; optionally wherein the cancerous cell is a glioblastoma cell.

65. The recombinant herpesvirus of claim 64, wherein the non-cancerous cell is selected from the group consisting of a neuron, an ependymal cell, an oligodendrocyte, an endothelial cell, a hepatocyte, an astrocyte, and any combination thereof.

66. The recombinant herpesvirus of claim 64, wherein the non-cancerous cell is an astrocyte.

67. The recombinant herpesvirus of any one of claims 38-66, wherein:
(a) the one or more miRNA target sequences for miR-34b-5p comprise or consist of SEQ ID NO: 867;
(b) the one or more miRNA target sequences for miR-34b-3p comprise or consist of SEQ ID NO: 868;
(c) the one or more miRNA target sequences for miR-34c-5p comprise or consist of SEQ ID NO: 869;
(d) the one or more miRNA target sequences for miR-122-5p comprise or consist of SEQ ID NO: 804;
(e) the one or more miRNA target sequences for miR-124-3p comprise or consist of SEQ ID NO: 805;
(f) the one or more miRNA target sequences for miR-128T comprise or consist of SEQ ID NO: 870;
(g) the one or more miRNA target sequences for miR-129-5p comprise or consist of SEQ ID NO: 813;
(h) the one or more miRNA target sequences for miR-129-2-3p comprise or consist of SEQ ID NO: 871;
(i) the one or more miRNA target sequences for miR-132-3p comprise or consist of SEQ ID NO: 872;
(j) the one or more miRNA target sequences for miR-137-3p comprise or consist of SEQ ID NO: 819; and/or
(k) the one or more miRNA target sequences for miR-145-5p comprise or consist of SEQ ID NO: 823.

68. The recombinant herpesvirus of any one of claims 1-67, comprising the polynucleotide encoding the retargeting domain, wherein the retargeting domain specifically binds a target protein expressed by a target cell.

69. The recombinant herpesvirus of claim 68, wherein the polynucleotide encoding the retargeting domain is inserted into the open reading frame of a US6 gene encoding a glycoprotein D (gD).

70. The recombinant herpesvirus of claim 69, wherein the polynucleotide encoding the retargeting domain replaces the US6 gene region encoding an amino acid sequence corresponding to amino acids 6-24 of SEQ ID NO: 921.

71. The recombinant herpesvirus of any one of claims 68-70, wherein the target protein expressed by the target cell comprises integrin α5β1, integrin αvβ1, integrin αvβ3, integrin αvβ6, or a combination thereof.

72. The recombinant herpesvirus of any one of claims 68-71, wherein the target protein expressed by the target cell comprises epidermal growth factor receptor (EGFR).

73. The recombinant herpesvirus of any one of claims 68-72, wherein the retargeting domain comprises a knottin peptide capable of specifically binding to the target protein expressed by the target cell.

74. The recombinant herpesvirus of claim 73, wherein the retargeting domain comprises no more than 50, no more than 45, no more than 40, or no more than 35 amino acids.

75. The recombinant herpesvirus of claim 73 or 74, wherein the retargeting domain comprises an amino acid sequence having at least 80%, at least 85%, at least 90%, or 100% identity to SEQ ID NO: 922.

76. The recombinant herpesvirus of any one of claims 68-75, wherein the retargeting domain comprises an immunoglobulin domain capable of specifically binding to the target protein expressed by the target cell.

77. The recombinant herpesvirus of any one of claims 68-76, wherein the retargeting domain comprises a binding domain of, or a binding domain derived from, a variable domain of a heavy chain-only antibody (VHH) or a variable domain of new antigen receptor immunoglobulin (V-NAR).

78. The recombinant herpesvirus of claim 76 or 77, wherein the retargeting domain comprises no more than 150, no more than 140, or no more than 130 amino acids.

79. The recombinant herpesvirus of any one of claims 76-78, wherein the retargeting domain comprises an amino acid sequence having at least 80%, at least 85%, at least 90%, or 100% identity to SEQ ID NO: 923.

80. The recombinant herpesvirus of any one of claims 68-79, wherein the herpesvirus is capable of infecting the target cell expressing the target protein.

81. The recombinant herpesvirus of any one of claims 68-80, wherein the herpesvirus is capable of infecting cells without Nectin-1 expression; optionally the cells are Vero cells.

82. The recombinant herpesvirus of any one of claims 1-81, comprising the UL30 viral gene encoding the DPCS comprising the mutation and the UL23 viral gene encoding the TK comprising the mutation.

83. The recombinant herpesvirus of claim 82, wherein the mutation in the DPCS increases DNA replication fidelity of the herpesvirus by at least 10%, at least 20%, at least 30%, at least 50%, at least 100%, at least 2-fold, at least 3-fold, or at least 5-fold.

84. The recombinant herpesvirus of claim 82 or 83, wherein the mutation in the DPCS is at an amino acid position corresponding to L774 of SEQ ID NO: 917; preferably, the mutation is an amino acid substitution.

85. The recombinant herpesvirus of claim 84, wherein the mutation in the DPCS is the amino acid substitution corresponding to L774F of SEQ ID NO: 917.

86. The recombinant herpesvirus of any one of claims 82-85, wherein the DPCS comprises an amino acid sequence at least 90%, at least 95%, at least 97%, at least 98%, at least 99%, or 100% identical to SEQ ID NO: 917, except for the mutation in the DPCS.

87. The recombinant herpesvirus of any one of claims 82-86, wherein the IC50 of acyclovir is less than 0.5 ug/ml, less than 1.0 ug/ml, less than 1.5 ug/ml, or less than 2.0 ug/ml for the herpesvirus.

88. The recombinant herpesvirus of any one of claims 82-87, wherein the mutation in the TK decreases the IC50 of acyclovir for the herpesvirus by at least 1-fold, at least 2-fold, at least 5-fold, at least 10-fold, at least 20-fold, at least 50-fold, or at least 100-fold.

89. The recombinant herpesvirus of any one of claims 82-88, wherein the mutation in the TK is at one or more amino acid positions corresponding to L159, 1160, F161, A168 and/or L169 of SEQ ID NO: 918; preferably, the mutation is amino acid substitution.

90. The recombinant herpesvirus of claim 89, wherein the mutation in the TK comprises one or more amino acid substitutions of:
(a) L159I or L159L;
(b) I160L or I160F;
(c) F161A, F161V, F161P, or F161L;
(d) A168D, A168Y, A168V or A168F; and/or
(e) L169F, L169Y, L169L, L169I, L169M, L169N, or L169K.

91. The recombinant herpesvirus of any one of claims 82-90, wherein the mutation in the TK comprises amino acid substitutions corresponding to L159I, 1160F, F161L, A168F and L169M of SEQ ID NO: 918.

92. The recombinant herpesvirus of any one of claims 82-90, wherein the mutation in the TK comprises amino acid substitutions corresponding to 1160F, F161A, and A168F of SEQ ID NO: 918.

93. The recombinant herpesvirus of any one of claims 82-90, wherein the mutation in the TK comprises amino acid substitutions corresponding to I160F, F161L, A168F, and L169N of SEQ ID NO: 918.

94. The recombinant herpesvirus of any one of claims 82-93, wherein the TK comprises an amino acid sequence at least 90%, at least 95%, at least 97%, at least 98%, at least 99%, or 100% identical to SEQ ID NO: 918, except the mutation in the TK.

95. The recombinant herpesvirus of any one of claims 1-94, wherein the viral genome of the herpesvirus encodes:
(i) the first gB and/or the second gB, wherein the first gB comprises the syncytial mutation, and wherein the second gB comprises no syncytial mutation;
(ii) the first gK and/or the second gK, wherein the first gK comprises the syncytial mutation, and wherein the second gK comprises no syncytial mutation;
(iii) the first gH and/or the second gH, wherein the first gH comprises the syncytial mutation, and wherein the second gH comprises no syncytial mutation;
(iv) the first UL20 and/or the second UL20, wherein the first UL20 comprises the syncytial mutation, and wherein the second UL20 comprises no syncytial mutation;
and/or
(v) the first UL24 and/or the second UL24, wherein the first UL24 comprises the syncytial mutation, and wherein the second UL24 comprises no syncytial mutation.

96. The recombinant herpesvirus of claim 95, wherein the first gB is encoded by an endogenous gB-encoding gene locus and the second gB is encoded by an exogenous expression cassette.

97. The recombinant herpesvirus of claim 95, wherein the first gB is encoded by an exogenous expression cassette and the second gB is encoded by an endogenous gB-encoding gene locus.

98. The recombinant herpesvirus of any one of claims 95-97, wherein the first gK is encoded by an endogenous gK-encoding gene locus and the second gK is encoded by an exogenous expression cassette.

99. The recombinant herpesvirus of any one of claims 95-97, wherein the first gK is encoded by an exogenous expression cassette and the second gK is encoded by an endogenous gK-encoding gene locus.

100. The recombinant herpesvirus of any one of claims 95-99, wherein the first gH is encoded by an endogenous gH-encoding gene locus and the second gH is encoded by an exogenous expression cassette.

101. The recombinant herpesvirus of any one of claims 95-99, wherein the first gH is encoded by an exogenous expression cassette and the second gH is encoded by an endogenous gH-encoding gene locus.

102. The recombinant herpesvirus of any one of claims 95-101, wherein the first UL20 is encoded by an endogenous UL20 gene locus and the second UL20 is encoded by an exogenous expression cassette.

103. The recombinant herpesvirus of any one of claims 95-101, wherein the first UL20 is encoded by an exogenous expression cassette and the second UL20 is encoded by an endogenous UL20 gene locus.

104. The recombinant herpesvirus of any one of claims 95-103, wherein the first UL24 is encoded by an endogenous UL24 gene locus and the second UL24 is encoded by an exogenous expression cassette.

105. The recombinant herpesvirus of any one of claims 95-103, wherein the first UL24 is encoded by an exogenous expression cassette and the second UL24 is encoded by an endogenous UL24 gene locus.

106. The recombinant herpesvirus of any one of claims 95-105, wherein the viral genome of the herpesvirus encodes the first gB but not the second gB.

107. The recombinant herpesvirus of any one of claims 95-106, wherein the viral genome of the herpesvirus encodes the first gK but not the second gK.

108. The recombinant herpesvirus of any one of claims 95-107, wherein the viral genome of the herpesvirus encodes the first gH but not the second gH.

109. The recombinant herpesvirus of any one of claims 95-108, wherein the viral genome of the herpesvirus encodes the first UL20 but not the second UL20

110. The recombinant herpesvirus of any one of claims 95-109, wherein the viral genome of the herpesvirus encodes the first UL24 but not the second UL24.

111. The recombinant herpesvirus of any one of claims 95-110, wherein the viral genome of the herpesvirus encodes the first gB and the first gK; optionally, wherein the viral genome of the herpesvirus further encodes the first gH and the first UL24.

112. The recombinant herpesvirus of any one of claims 96-111, wherein the exogenous expression cassette is located at UL3-UL4 intergenic region.

113. The recombinant herpesvirus of any one of claims 96-111, wherein the exogenous expression cassette is located at UL50-UL51 intergenic region.

114. The recombinant herpesvirus of any one of claims 95-113, wherein the recombinant herpesvirus displays syncytial phenotype in cancer cells.

115. A cell, comprising a recombinant nucleic acid encoding the recombinant herpesvirus of any one of claims 95-114.

116. A cell, comprising a first nucleic acid encoding a recombinant herpesvirus and a second nucleic acid, wherein:
(i) the viral genome of the herpesvirus encodes a first gB, wherein the first gB comprises a syncytial mutation, the second nucleic acid encodes a second gB, wherein the second gB comprises no syncytial mutation; or, the viral genome of the herpesvirus encodes a second gB, wherein the second gB comprises no syncytial mutation, the second nucleic acid encodes a first gB, wherein the first gB comprises a syncytial mutation;
(ii) the viral genome of the herpesvirus encodes a first gK, wherein the first gK comprises a syncytial mutation, the second nucleic acid encodes a second gK, wherein the second gK comprises no syncytial mutation; or the viral genome of the herpesvirus encodes a second gK, wherein the second gK comprises no syncytial mutation, the second nucleic acid encodes a first gK, wherein the first gK comprises a syncytial mutation;
(iii) the viral genome of the herpesvirus encodes a first gH, wherein the first gH comprises a syncytial mutation, the second nucleic acid encodes a second gH, wherein the second gH comprises no syncytial mutation; or the viral genome of the herpesvirus encodes a second gH, wherein the second gH comprises no syncytial mutation, the second nucleic acid encodes a first gH, wherein the first gH comprises a syncytial mutation;
(iv) the viral genome of the herpesvirus encodes a first UL20, wherein the first UL20 comprises a syncytial mutation, the second nucleic acid encodes a second UL20, wherein the second UL20 comprises no syncytial mutation; or the viral genome of the herpesvirus encodes a second UL20, wherein the second UL20 comprises no syncytial mutation, the second nucleic acid encodes a first UL20, wherein the first UL20 comprises a syncytial mutation; and/or
(v) the viral genome of the herpesvirus encodes a first UL24, wherein the first UL24 comprises a syncytial mutation, the second nucleic acid encodes a second UL24, wherein the second UL24 comprises no syncytial mutation; or the viral genome of the herpesvirus encodes a second UL24, wherein the second UL24 comprises no syncytial mutation, the second nucleic acid encodes a first UL24, wherein the first UL24 comprises a syncytial mutation.

117. The cell of claim 116, wherein the viral genome of the herpesvirus encodes the first gB, wherein the first gB comprises the syncytial mutation, wherein the second nucleic acid encodes the second gB, wherein the second gB comprises no syncytial mutation.

118. The cell of claim 116, wherein the viral genome of the herpesvirus encodes the second gB, wherein the second gB comprises no syncytial mutation, wherein the second nucleic acid encodes the first gB, wherein the first gB comprises the syncytial mutation.

119. The cell of any one of claims 116-118, wherein the viral genome of the herpesvirus encodes the first gK, wherein the first gK comprises the syncytial mutation, wherein the second nucleic acid encodes the second gK, wherein the second gK comprises no syncytial mutation.

120. The cell of any one of claims 116-118, wherein the viral genome of the herpesvirus encodes the second gK, wherein the second gK comprises no syncytial mutation, wherein the second nucleic acid encodes the first gK, wherein the first gK comprises the syncytial mutation.

121. The cell of any one of claims 116-120, wherein the viral genome of the herpesvirus encodes the first gH, wherein the first gH comprises the syncytial mutation, wherein the second nucleic acid encodes the second gH, wherein the second gH comprises no syncytial mutation.

122. The cell of any one of claims 116-120, wherein the viral genome of the herpesvirus encodes the second gH, wherein the second gH comprises no syncytial mutation, wherein the second nucleic acid encodes the first gH, wherein the first gH comprises the syncytial mutation.

123. The cell of any one of claims 116-122, wherein the viral genome of the herpesvirus encodes the first UL20, wherein the first UL20 comprises the syncytial mutation, wherein the second nucleic acid encodes the second UL20, wherein the second UL20 comprises no syncytial mutation.

124. The cell of any one of claims 116-122, wherein the viral genome of the herpesvirus encodes the second UL20, wherein the second UL20 comprises no syncytial mutation, wherein the second nucleic acid encodes the first UL20, wherein the first UL20 comprises the syncytial mutation.

125. The cell of any one of claims 116-124, wherein the viral genome of the herpesvirus encodes the first UL24, wherein the first UL24 comprises the syncytial mutation, wherein the second nucleic acid encodes the second UL24, wherein the second UL24 comprises no syncytial mutation.

126. The cell of any one of claims 116-124, wherein the viral genome of the herpesvirus encodes the second UL24, wherein the second UL24 comprises no syncytial mutation, wherein the second nucleic acid encodes the first UL24, wherein the first UL24 comprises the syncytial mutation.

127. The cell of any one of claims 116-126, wherein the recombinant herpesvirus comprises a single copy of gB-encoding viral gene, a single copy of gK-encoding viral gene, a single copy of gH-encoding viral gene, a single copy of UL20 viral gene, and/or a single copy of UL24 viral gene.

128. The cell of any of claims 116-127, wherein the first nucleic acid and the second nucleic acid are comprised within a single polynucleotide molecule.

129. The cell of any of claims 116-127, wherein the first nucleic acid and the second nucleic acid are comprised within two different polynucleotide molecules.

130. The cell of any of claims 115-129, wherein the cell is a Vero cell.

131. The recombinant herpesvirus of any of claims 95-114 or the cell of any of claims 115-130, wherein the gB syncytial mutation comprises a mutation at one or more amino acid residues corresponding to R796, R800, T813, L817, S854, A855, R858, or A874, an insertion between E816 and L817, a deletion of S869 to C-terminus, a deletion of T877 to C-terminus, or a combination thereof, of SEQ ID NO: 919.

132. The recombinant herpesvirus of any of claims 95-114 or the cell of any of claims 115-130, wherein the gB syncytial mutation comprises one or more mutations corresponding to R796C, R800W, T813I, L817H, L817P, S854F, A855V, R858C, R858H, A874P, an insertion of VN or VNVN between E816 and L817, a deletion of S869 to C-terminus, or a deletion of T877 to C-terminus, of SEQ ID NO: 919.

133. The recombinant herpesvirus of any of claims 95-114 or the cell of any of claims 115-130, wherein the gB syncytial mutation comprises a deletion of T877 to C-terminus according to SEQ ID NO: 919.

134. The recombinant herpesvirus of any of claims 95-114 and 131-133, or the cell of any of claims 115-133, wherein the first and/or the second gB comprise a mutation corresponding to D285N and/or A549T of SEQ ID NO: 919.

135. The recombinant herpesvirus of any of claims 95-114 and 131-134, or the cell of any of claims 115-134, wherein the gK syncytial mutation comprises a mutation at one or more amino acid residues corresponding to P33, A40, L86, D99, A111, L118, T121, C243, L304, 1307, or R310 of SEQ ID NO: 920.

136. The recombinant herpesvirus of any of claims 95-114 and 131-134, or the cell of any of claims 115-134, wherein the gK syncytial mutation comprises one or more mutations corresponding to P33S, A40V, A40T, L86P, D99N, A111V, L118Q, T121I, C243Y, L304P, 1307N, or R310L of SEQ ID NO: 920.

137. The recombinant herpesvirus of any of claims 95-114 and 131-134, or the cell of any of claims 115-134, wherein the gK syncytial mutation comprises 1307N according to SEQ ID NO: 920.

138. The recombinant herpesvirus of any of claims 95-114 and 131-137, or the cell of any of claims 115-137, wherein the gH syncytial mutation comprises a mutation at one or more amino acid residues corresponding to N753 or A778 of SEQ ID NO: 943.

139. The recombinant herpesvirus of any of claims 95-114 and 131-137, or the cell of any of claims 115-137, wherein the gH syncytial mutation comprises one or more mutations corresponding to N753K or A778V of SEQ ID NO: 943.

140. The recombinant herpesvirus of any of claims 95-114 and 131-139, or the cell of any of claims 115-139, wherein the UL20 syncytial mutation comprises a mutation at one or more amino acid residues corresponding to Y49, S50, R51, R209, T212, R213, or C-terminal deletion after N217, of SEQ ID NO: 944.

141. The recombinant herpesvirus of any of claims 95-114 and 131-139, or the cell of any of claims 115-139, wherein the UL20 syncytial mutation comprises one or more mutations corresponding to Y49A, S50A, R51A, R209A, T212A, R213A, or C-terminal deletion after N217, of SEQ ID NO: 944.

142. The recombinant herpesvirus of any of claims 95-114 and 131-141, or the cell of any of claims 115-141, wherein the UL24 syncytial mutation comprises a mutation at one or more amino acid residues corresponding to T64, R63, or V64 of SEQ ID NO: 942.

143. The recombinant herpesvirus of any of claims 95-114 and 131-141, or the cell of any of claims 115-141, wherein the UL24 syncytial mutation comprises one or more mutations corresponding to T64G, R63V, or V64S of SEQ ID NO: 942.

144. The recombinant herpesvirus of any of claims 95-114 and 131-143, or the cell of any of claims 115-143, wherein the open reading frame encoding the first gB is operably linked to a CMV promoter and/or a bGH poly A tail.

145. The recombinant herpesvirus of any of claims 95-114 and 131-143, or the cell of any of claims 115-143, wherein the open reading frame encoding the second gB is operably linked to a CMV promoter and/or a bGH poly A tail.

146. The recombinant herpesvirus of any of claims 95-114 and 131-145, or the cell of any of claims 115-145, wherein the open reading frame encoding the first gK is operably linked to a CMV promoter and/or a bGH poly A tail.

147. The recombinant herpesvirus of any of claims 95-114 and 131-145, or the cell of any of claims 115-145, wherein the open reading frame encoding the second gK is operably linked to a CMV promoter and/or a bGH poly A tail.

148. The recombinant herpesvirus of any of claims 95-114 and 131-147, or the cell of any of claims 115-147, wherein the yield of the recombinant herpesvirus is at least 1-fold, at least 2-fold, at least 3-fold, at least 5-fold, at least 8-fold, at least 10-fold, at least 20-fold, at least 50-fold, at least 100-fold, at least 200-fold, at least 500-fold, or at least 1000-fold higher than the yield of a control herpesvirus or a control cell that does not encode the second gB, the second gK, the second gH, the second UL20, or the second UL24.

149. The recombinant herpesvirus of any of claims 95-114 and 131-148, or the cell of any of claims 115-148, wherein the gene encoding the first gB comprises a miRNA target sequence (miR-TS) cassette, wherein the miR-TS cassette comprises one or more target sequences of one or more miRNAs.

150. The recombinant herpesvirus of any of claims 95-114 and 131-149, or the cell of any of claims 115-149, wherein the gene encoding the first gK comprises a miRNA target sequence (miR-TS) cassette, wherein the miR-TS cassette comprises one or more target sequences of one or more miRNAs.

151. The recombinant herpesvirus of any of claims 95-114 and 131-150, or the cell of any of claims 115-150, wherein the gene encoding the first gH comprises a miRNA target sequence (miR-TS) cassette, wherein the miR-TS cassette comprises one or more target sequences of one or more miRNAs.

152. The recombinant herpesvirus of any of claims 95-114 and 131-151, or the cell of any of claims 115-151, wherein the gene encoding the first UL20 comprises a miRNA target sequence (miR-TS) cassette, wherein the miR-TS cassette comprises one or more target sequences of one or more miRNAs.

153. The recombinant herpesvirus of any of claims 95-114 and 131-152, or the cell of any of claims 115-152, wherein the gene encoding the first UL24 comprises a miRNA target sequence (miR-TS) cassette, wherein the miR-TS cassette comprises one or more target sequences of one or more miRNAs.

154. The recombinant herpesvirus of any one of claims 149-153, or the cell of any one of claims 149-153, wherein the one or more miRNAs comprise at least one of miR-34c-5p, miR-299-5p, and miR-582-5p.

155. The recombinant herpesvirus of any one of claims 149-153, or the cell of any one of claims 149-153, wherein the one or more miRNAs comprise at least two of miR-34c-5p, miR-299-5p, and miR-582-5p.

156. The recombinant herpesvirus of any one of claims 149-153, or the cell of any one of claims 149-153, wherein the one or more miRNAs comprise miR-34c-5p, miR-299-5p, and miR-582-5p.

157. The recombinant herpesvirus or the cell of any of claims 149-156, wherein the miR-TS cassette comprises at least three copies, or at least four copies of the target sequences of each of the miRNA separated by a 4 bp spacer.

158. The recombinant herpesvirus or the cell of any of claims 149-157, wherein the miR-TS cassette is located at the 3′UTR of the gene.

159. The recombinant herpesvirus or the cell of any of claims 149-158, wherein the target sequence of the miRNA comprises or consists of the reverse complement of the miRNA.

160. The recombinant herpesvirus or the cell of any of claims 149-159, wherein the miR-TS cassette comprises the polynucleotide sequence of SEQ ID NO: 930.

161. The recombinant herpesvirus or the cell of any of claims 149-160, wherein the yield of the recombinant herpesvirus is at least 1-fold, at least 2-fold, at least 3-fold, at least 5-fold, at least 8-fold, at least 10-fold, at least 20-fold, at least 50-fold, at least 100-fold, at least 200-fold, at least 500-fold, or at least 1000-fold higher than the yield of a control herpesvirus or a control cell that does not comprise the miR-TS cassette.

162. A recombinant herpesvirus produced by culturing the cell of any of claims 115-161 and recovering the recombinant herpesvirus from the cell culture.

163. A recombinant herpesvirus, wherein the viral genome of the herpesvirus encodes a gK comprising a syncytial mutation corresponding to 1307N of SEQ ID NO: 920.

164. The recombinant herpesvirus of any one of claims 1-114 and 131-163, or the cell of any of claims 115-161, wherein the herpesvirus is an alphaherpesvirus.

165. The recombinant herpesvirus or the cell of claim 164, wherein the alphaherpesvirus is a herpes simplex virus.

166. The recombinant herpesvirus or the cell of claim 165, wherein the herpes simplex virus is a herpes simplex virus-1 (HSV-1).

167. The recombinant herpesvirus of any one of claims 1-114 and 131-166, or the cell of any of claims 115-161 and 164-166, wherein the recombinant herpesvirus is oncolytic.

168. The recombinant herpesvirus or the cell of any one of claims 164-167, wherein the recombinant herpesvirus is derived from an encephalitic HSV isolate according to SEQ ID NO: 857; optionally wherein the recombinant herpesvirus comprises a polynucleotide sequence having at least 80%, at least 85%, at least 90%, at least 95%, at least 96%, at least 97%, at least 98%, at least 99%, at least 99.5%, or 100% identity to SEQ ID NO: 857.

169. The recombinant herpesvirus or the cell of any one of claims 164-168, wherein the recombinant herpesvirus is defective for anterograde transport.

170. The recombinant herpesvirus of any one of claims 1-114 and 131-169, comprising a mutation in the UL37 viral gene.

171. The recombinant herpesvirus of claim 170, wherein the UL37 viral gene encodes a UL37 protein comprising a mutation at at least 1, at least 2, at least 3, at least 4, or all 5 amino acid positions corresponding to Q403, E452, Q455, Q511, and R515 of SEQ ID NO: 856.

172. The recombinant herpesvirus of claim 171, where the mutation in the UL37 viral gene comprises Q403A, E452A, Q455A, Q511A, and R515A according to SEQ ID NO: 856.

173. The recombinant herpesvirus of any one of claims 1-114 and 131-172, encoding a gB comprising the mutations corresponding to A549T/D285N of SEQ ID NO: 919.

174. The recombinant herpesvirus of any one of claims 1-114 and 131-173, wherein the recombinant herpesvirus retains the function of ICP6, ICP34.5, and/or ICP47.

175. The recombinant herpesvirus of any one of claims 1-114 and 131-174, wherein the one or more transgenes are inserted in the UL50-UL51 intergenic region.

176. A recombinant virus comprising one or more transgenes encoding one or more payload proteins selected from HPGD, ADA2, HYAL1, CHP, CCL21, IL-12, a CD47 antagonist, a TGFβ antagonist, a PD1 antagonist, a TREM2 antagonist, a biomolecule comprising chlorotoxin (CTX), or any combinations thereof.

177. The recombinant virus of claim 176, wherein the one or more payload proteins comprise or consist of IL-12, a PD1 antagonist, and a TREM2 antagonist.

178. The recombinant virus of claim 177, wherein the one or more payload proteins comprise HPGD.

179. The recombinant virus of claim 177 or 178, wherein the one or more payload proteins comprise a biomolecule comprising CTX.

180. The recombinant virus of claim 176, wherein the one or more payload proteins comprise or consist of one of the combinations of payload proteins listed in Tables 4-7.

181. The recombinant virus of any one of claims 176-180, wherein the one or more payload proteins comprise HPGD.

182. The recombinant virus of any one of claims 176-181, wherein the one or more payload proteins comprise ADA2.

183. The recombinant virus of any one of claims 176-182, wherein the one or more payload proteins comprise HYAL1.

184. The recombinant virus of any one of claims 176-183, wherein the one or more payload proteins comprise CHP.

185. The recombinant virus of any one of claims 176-184, wherein the one or more payload proteins comprise CCL21.

186. The recombinant virus of any one of claims 176-185, wherein the one or more payload proteins comprise IL-12.

187. The recombinant virus of any one of claims 176-186, wherein the one or more payload proteins comprise the CD47 antagonist.

188. The recombinant virus of any one of claims 176-187, wherein the one or more payload proteins comprise the TGFβ antagonist.

189. The recombinant virus of any one of claims 176-188, wherein the one or more payload proteins comprise the PD1 antagonist.

190. The recombinant virus of any one of claims 176-189, wherein the one or more payload proteins comprise the TREM2 antagonist.

191. The recombinant virus of any one of claims 176-190, wherein the antagonist comprises an antibody or antigen binding fragment thereof.

192. The recombinant virus of any one of claims 176-191, wherein the one or more payload proteins comprise the biomolecule comprising CTX.

193. The recombinant virus of claim 179 or 192, wherein the biomolecule comprising CTX further comprises a T-cell engager moiety specifically binding to a protein expressed on the surface of the T-cell.

194. The recombinant virus of claim 193, wherein the protein expressed on the surface of the T-cell is CD3.

195. A recombinant virus comprising:
(a) one or more miRNA target sequences for miR-122-5p;
(b) one or more miRNA target sequences for miR-145-5p;
(c) one or more miRNA target sequences for miR-124-3p, miR-128T, miR-137-3p, or any combination thereof;
(d) one or more miRNA target sequences for miR-34b-5p, miR-34c-5p, or any combination thereof; and
(e) one or more miRNA target sequences for miR-129-2-3p, miR-132-3p, or any combination thereof.

196. The recombinant virus of claim 195, comprising the miRNA target sequences for miR-34b-5p, miR-34c-5p, miR-122-5p, miR-124-3p, miR-128T, miR-129-2-3p, miR-132-3p, miR-137-3p, and miR-145-5p.

197. A recombinant virus, wherein the viral genome of the recombinant virus encodes a protein comprising a syncytial mutation and a counterpart protein without the syncytial mutation.

198. The recombinant virus of claim 197, wherein the protein comprising the syncytial mutation and the counterpart protein without the syncytial mutation share at least 90%, at least 95%, at least 96%, at least 97%, at least 98%, at least 99%, or 100% sequence identity, except the syncytial mutation.

199. The recombinant virus of claim 197 or 198, wherein the protein comprising the syncytial mutation is encoded by an endogenous viral gene and the counterpart protein without the syncytial mutation is encoded by an exogenous expression cassette.

200. The recombinant virus of claim 197 or 198, wherein the protein comprising the syncytial mutation is encoded by an exogenous expression cassette and the counterpart protein without the syncytial mutation is encoded by an endogenous viral gene.

201. The recombinant virus of claim 197 or 198, wherein both the protein comprising the syncytial mutation and the counterpart protein without the syncytial mutation are encoded by one exogenous expression cassette or by different exogenous expression cassettes.

202. A cell, comprising a recombinant nucleic acid encoding the recombinant virus of any one of claims 197-201.

203. A cell, comprising a first nucleic acid encoding a recombinant virus and a second nucleic acid,
wherein the viral genome of the recombinant virus encodes a protein comprising a syncytial mutation,
wherein the second nucleic acid encodes a a counterpart protein without the syncytial mutation.

204. The cell of claim 203, wherein the protein comprising the syncytial mutation and the counterpart protein without the syncytial mutation share at least 90%, at least 95%, at least 96%, at least 97%, at least 98%, at least 99%, or 100% sequence identity, except the syncytial mutation.

205. The recombinant virus of any one of claims 197-201 or the cell of any one of claims 202-204, wherein the yield of the virus is at least 1-fold, at least 2-fold, at least 3-fold, at least 5-fold, at least 8-fold, at least 10-fold, at least 20-fold, at least 50-fold, at least 100-fold, at least 200-fold, at least 500-fold, or at least 1000-fold higher than the yield of a control virus or a control cell that does not encodes the counterpart protein without the syncytial mutation.

206. The recombinant virus of any one of claims 197-201 and 205, or the cell of any one of claims 202-205, wherein the gene encoding the protein comprising the syncytial mutation comprises a miRNA target sequence (miR-TS) cassette, wherein the miR-TS cassette comprises one or more target sequences of one or more miRNAs.

207. The recombinant virus or the cell of claim 206, wherein the one or more miRNAs comprise at least one, at least two, or all of miRNAs selected from miR-34c-5p, miR-299-5p, and miR-582-5p.

208. The recombinant virus or the cell of claim 206 or 207, wherein the yield of the recombinant virus is at least 1-fold, at least 2-fold, at least 3-fold, at least 5-fold, at least 8-fold, at least 10-fold, at least 20-fold, at least 50-fold, at least 100-fold, at least 200-fold, at least 500-fold, or at least 1000-fold higher than the yield of a control virus or a control cell that does not comprise the miR-TS cassette.

209. The recombinant virus produced by culturing the cell of any of claims 202-208 and recovering the recombinant herpesvirus from the cell culture.

210. The recombinant virus of any one of claims 176-201 and 205-209, or the cell of any of claims 202-208, wherein the recombinant virus is derived from a herpes simplex virus, an adenovirus, a polio virus, a vaccinia virus, a measles virus, a vesicular stomatitis virus, an orthomyxovirus, a parvovirus, a maraba virus, or a coxsackievirus.

211. The recombinant virus of any one of claims 176-201 and 205-210, or the cell of any of claims 202-208, wherein the recombinant virus is oncolytic.

212. A nucleic acid molecule encoding the recombinant herpesvirus of any one of claims 1-114 and 131-175, or the recombinant virus of any one of claims 176-201 and 205-211.

213. The nucleic acid molecule of claim 212, wherein the nucleic acid molecule is DNA.

214. The nucleic acid molecule of claim 212, wherein the nucleic acid molecule is RNA.

215. A viral stock comprising the recombinant herpesvirus of any one of claims 1-114 and 131-175, or the recombinant virus of any one of claims 176-201 and 205-211.

216. A particle comprising the nucleic acid molecule of any one of claims 212-214.

217. The particle of claim 216, wherein the particle is selected from the group consisting of a nanoparticle, an exosome, a liposome, and a lipoplex.

218. The particle of claim 216, wherein the particle is a lipid nanoparticle.

219. The particle of any one of claims 216-218, wherein contacting a eukaryotic cell with the particle results in production of infectious virus particles by the eukaryotic cell.

220. A pharmaceutical composition comprising:
(i) the recombinant herpesvirus of any one of claims 1-114 and 131-175, the recombinant virus of any one of claims 176-201 and 205-211, the nucleic acid molecule of any one of claims 212-214, or the particle of any one of claims 216-219; and
(ii) a pharmaceutically-acceptable carrier.

221. A method of killing a cancerous cell, comprising exposing the cancerous cell to the recombinant herpesvirus of any one of claims 1-114 and 131-175, the recombinant virus of any one of claims 176-201 and 205-211, the particle of any one of claims 216-219, or the pharmaceutical composition of claim 220, under conditions sufficient for the virus or particle to infect and the virus to replicate within said cancerous cell, and wherein replication of the virus within the cancerous cell results in cell death.

222. The method of claim 221, wherein the cell is in vitro or in vivo.

223. The method of claim 221 or 222, wherein the cancerous cell has a reduced expression of a miRNA capable of binding to the one or more miRNA target sequences compared to the expression of the miRNA in a non-cancerous cell.

224. The method of any one of claims 221-223, wherein replication of the virus is increased or maintained in the cancerous cell with a reduced expression of the miR capable of binding to the one or more miRNA target sequences.

225. The method of any one of claims 221-224, wherein the cancerous cell is a cell of lung cancer, breast cancer, ovarian cancer, cervical cancer, prostate cancer, testicular cancer, colorectal cancer, colon cancer, pancreatic cancer, liver cancer, gastric cancer, head and neck cancer, thyroid cancer, malignant glioma, glioblastoma, melanoma, non-melanoma skin cancer, B-cell chronic lymphocytic leukemia, diffuse large B-cell lymphoma (DLBCL), or marginal zone lymphoma (MZL).

226. The method of any one of claims 221-224, wherein the cancerous cell is a glioblastoma cell.

227. A method of treating cancer in a subject in need thereof, comprising administering the recombinant herpesvirus of any one of claims 1-114 and 131-175, the recombinant virus of any one of claims 176-201 and 205-211, the particle of any one of claims 216-219, or the pharmaceutical composition of claim 220 to the subject.

228. The method of claim 227, wherein the virus, the particle, or the composition is administered intravenously, subcutaneously, intratumorally, intramuscularly, or intranasally.

229. The method of claim 227, wherein the virus, the particle, or the composition is administered intratumorally.

230. The method of claim 227, wherein the virus, the particle, or the composition is administered intravenously.

231. The method of any one of claims 227-230, wherein the virus, the particle, or the composition is administered only once.

232. The method of any one of claims 227-231, wherein the cancer is selected from the group consisting of lung cancer, breast cancer, ovarian cancer, cervical cancer, prostate cancer, testicular cancer, colorectal cancer, colon cancer, pancreatic cancer, liver cancer, gastric cancer, head and neck cancer, thyroid cancer, malignant glioma, glioblastoma, melanoma, non-melanoma skin cancer, B-cell chronic lymphocytic leukemia, diffuse large B-cell lymphoma (DLBCL), and marginal zone lymphoma (MZL).

233. The method of any one of claims 227-231, wherein the cancer is glioblastoma.

234. A cell line, comprising the cell of any of claims 115-160 and 202-208.

235. A method of producing a recombinant herpesvirus, comprising culturing the cell of any of claims 115-160 and 202-208, or the cell line of claim 234, and recovering the recombinant herpesvirus from the cell culture.

236. The recombinant herpesvirus of any one of claims 82-114 and 131-175 for use in combination with a small molecule for imaging the infection site of the herpesvirus.

237. A method of imaging the infection site of an herpesvirus in vivo, comprising administering the recombinant herpesvirus of any one of claims 82-114 and 131-175 and a small molecule.

238. The recombinant virus for use of claim 236 or the method of claim 237, wherein the small molecule is radioisotope labeled acyclovir; optionally wherein the radioisotope label comprises fluorine-18 (¹⁸F) label.

The application's sequence listing, which the Patent Office published only in electronic form, follows.

SEQUENCE LISTING (944 sequences)

SEQ ID NO: 1 - RNA, 22 nt, Homo sapiens
  source 1..22: mol_type = other RNA
tggagtgtgacaatggtgtttg

SEQ ID NO: 2 - RNA, 20 nt, Homo sapiens
  source 1..20: mol_type = other RNA
taaggcacgcggtgaatgcc

SEQ ID NO: 3 - RNA, 24 nt, Homo sapiens
  source 1..24: mol_type = other RNA
tccctgagaccctttaacctgtga

SEQ ID NO: 4 - RNA, 22 nt, Homo sapiens
  source 1..22: mol_type = other RNA
tcgtaccgtgagtaataatgcg

SEQ ID NO: 5 - RNA, 22 nt, Homo sapiens
  source 1..22: mol_type = other RNA
tcggatccgtctgagcttggct

SEQ ID NO: 6 - RNA, 21 nt, Homo sapiens
  source 1..21: mol_type = other RNA
tcacagtgaaccggtctcttt

SEQ ID NO: 7 - RNA, 22 nt, Homo sapiens
  source 1..22: mol_type = other RNA
aagcccttaccccaaaaagtat

SEQ ID NO: 8 - RNA, 21 nt, Homo sapiens
  source 1..21: mol_type = other RNA
ctttttgcggtctgggcttgc

SEQ ID NO: 9 - RNA, 22 nt, Homo sapiens
  source 1..22: mol_type = other RNA
cagtgcaatgatgaaagggcat

SEQ ID NO: 10 - RNA, 21 nt, Homo sapiens
  source 1..21: mol_type = other RNA
actctttccctgttgcactac

SEQ ID NO: 11 - RNA, 22 nt, Homo sapiens
  source 1..22: mol_type = other RNA
tttggtccccttcaaccagctg

SEQ ID NO: 12 - RNA, 22 nt, Homo sapiens
  source 1..22: mol_type = other RNA
tttggtccccttcaaccagcta

SEQ ID NO: 13 - RNA, 23 nt, Homo sapiens
  source 1..23: mol_type = other RNA
cctgtgggccacctagtcaccaa

SEQ ID NO: 14 - RNA, 23 nt, Homo sapiens
  source 1..23: mol_type = other RNA
ttattgcttaagaatacgcgtag

SEQ ID NO: 15 - RNA, 22 nt, Homo sapiens
  source 1..22: mol_type = other RNA
tggaatgtaaagaagtatgtat

SEQ ID NO: 16 - RNA, 21 nt, Homo sapiens
  source 1..21: mol_type = other RNA
tgagatgaagcactgtagctc

SEQ ID NO: 17 - RNA, 22 nt, Homo sapiens
  source 1..22: mol_type = other RNA
ggattcctggaaatactgttct

SEQ ID NO: 18 - RNA, 23 nt, Homo sapiens
  source 1..23: mol_type = other RNA
gtccagttttcccaggaatccct

SEQ ID NO: 19 - RNA, 22 nt, Homo sapiens
  source 1..22: mol_type = other RNA
tggacggagaactgataagggt

SEQ ID NO: 20 - RNA, 22 nt, Homo sapiens
  source 1..22: mol_type = other RNA
acagtagtctgcacattggtta

SEQ ID NO: 21 - RNA, 23 nt, Homo sapiens
  source 1..23: mol_type = other RNA
cccagtgttcagactacctgttc

SEQ ID NO: 22 - RNA, 22 nt, Homo sapiens
  source 1..22: mol_type = other RNA
ttccctttgtcatcctatgcct

SEQ ID NO: 23 - RNA, 22 nt, Homo sapiens
  source 1..22: mol_type = other RNA
ataagacgaacaaaaggtttgt

SEQ ID NO: 24 - RNA, 22 nt, Homo sapiens
  source 1..22: mol_type = other RNA
acagcaggcacagacaggcagt

SEQ ID NO: 25 - RNA, 23 nt, Homo sapiens
  source 1..23: mol_type = other RNA
tactgcatcaggaactgattgga

SEQ ID NO: 26 - RNA, 21 nt, Homo sapiens
  source 1..21: mol_type = other RNA
tgattgtccaaacgcaattct

SEQ ID NO: 27 - RNA, 22 nt, Homo sapiens
  source 1..22: mol_type = other RNA
tgtcagtttgtcaaatacccca

SEQ ID NO: 28 - RNA, 22 nt, Homo sapiens
  source 1..22: mol_type = other RNA
tggcagtgtcttagctggttgt

SEQ ID NO: 29 - RNA, 22 nt, Homo sapiens
  source 1..22: mol_type = other RNA
aaaccgttaccattactgagtt

SEQ ID NO: 30 - RNA, 21 nt, Homo sapiens
  source 1..21: mol_type = other RNA
taaagtaaatatgcaccaaaa

SEQ ID NO: 31 - RNA, 22 nt, Homo sapiens
  source 1..22: mol_type = other RNA
tgaggtagtaggttgtatagtt

SEQ ID NO: 32 - RNA, 23 nt, Homo sapiens
  source 1..23: mol_type = other RNA
tctttggttatctagctgtatga

SEQ ID NO: 33 - RNA, 22 nt, Homo sapiens
  source 1..22: mol_type = other RNA
tgaggtagtaggttgtgtggtt

SEQ ID NO: 34 - RNA, 22 nt, Homo sapiens
  source 1..22: mol_type = other RNA
tgaggtagtaggttgtatggtt

SEQ ID NO: 35 - RNA, 22 nt, Homo sapiens
  source 1..22: mol_type = other RNA
agaggtagtaggttgcatagtt

SEQ ID NO: 36 - RNA, 22 nt, Homo sapiens
  source 1..22: mol_type = other RNA
tgaggtaggaggttgtatagtt

SEQ ID NO: 37 - RNA, 22 nt, Homo sapiens
  source 1..22: mol_type = other RNA
tgaggtagtagattgtatagtt

SEQ ID NO: 38 - RNA, 22 nt, Homo sapiens
  source 1..22: mol_type = other RNA
tgaggtagtagtttgtacagtt

SEQ ID NO: 39 - RNA, 22 nt, Homo sapiens
  source 1..22: mol_type = other RNA
tgaggtagtagtttgtgctgtt

SEQ ID NO: 40 - RNA, 22 nt, Homo sapiens
  source 1..22: mol_type = other RNA
aacccgtagatccgaacttgtg

SEQ ID NO: 41 - RNA, 21 nt, Homo sapiens
  source 1..21: mol_type = other RNA
tacagtactgtgataactgaa

SEQ ID NO: 42 - RNA, 23 nt, Homo sapiens
  source 1..23: mol_type = other RNA
agcagcattgtacagggctatga

SEQ ID NO: 43 - RNA, 23 nt, Homo sapiens
  source 1..23: mol_type = other RNA
tcaaatgctcagactcctgtggt

SEQ ID NO: 44 - RNA, 23 nt, Homo sapiens
  source 1..23: mol_type = other RNA
aaaagtgcttacagtgcaggtag

SEQ ID NO: 45 - RNA, 21 nt, Homo sapiens
  source 1..21: mol_type = other RNA
taaagtgctgacagtgcagat

SEQ ID NO: 46 - RNA, 23 nt, Homo sapiens
  source 1..23: mol_type = other RNA
agcagcattgtacagggctatca

SEQ ID NO: 47 - RNA, 23 nt, Homo sapiens
  source 1..23: mol_type = other RNA
taccctgtagatccgaatttgtg

SEQ ID NO: 48 - RNA, 23 nt, Homo sapiens
  source 1..23: mol_type = other RNA
taccctgtagaaccgaatttgtg

SEQ ID NO: 49 - RNA, 21 nt, Homo sapiens
  source 1..21: mol_type = other RNA
ttgctcactgttcttccctag

SEQ ID NO: 50 - RNA, 22 nt, Homo sapiens
  source 1..22: mol_type = other RNA
tttccggctcgcgtgggtgtgt

SEQ ID NO: 51 - RNA, 27 nt, Homo sapiens
  source 1..27: mol_type = other RNA
cactgtaggtgatggtgagagtgggca

SEQ ID NO: 52 - RNA, 22 nt, Homo sapiens
  source 1..22: mol_type = other RNA
atatacagggggagactcttat

SEQ ID NO: 53 - RNA, 22 nt, Homo sapiens
  source 1..22: mol_type = other RNA
atatacagggggagactctcat

SEQ ID NO: 54 - RNA, 21 nt, Homo sapiens
  source 1..21: mol_type = other RNA
agaggataccctttgtatgtt

SEQ ID NO: 55 - RNA, 23 nt, Homo sapiens
  source 1..23: mol_type = other RNA
gggatggtagaccggtgacgtgc

SEQ ID NO: 56 - RNA, 21 nt, Homo sapiens
  source 1..21: mol_type = other RNA
taggacacatggtctacttct

SEQ ID NO: 57 - RNA, 22 nt, Homo sapiens
  source 1..22: mol_type = other RNA
ctcctgagccattctgagcctc

SEQ ID NO: 58 - RNA, 21 nt, Homo sapiens
  source 1..21: mol_type = other RNA
gtgccagctgcagtgggggag

SEQ ID NO: 59 - RNA, 21 nt, Homo sapiens
  source 1..21: mol_type = other RNA
cccggagccaggatgcagctc

SEQ ID NO: 60 - RNA, 21 nt, Homo sapiens
  source 1..21: mol_type = other RNA
tcgtggcctggtctccattat

SEQ ID NO: 61 - RNA, 20 nt, Homo sapiens
  source 1..20: mol_type = other RNA
tctgcagggtttgctttgag

SEQ ID NO: 62 - RNA, 21 nt, Homo sapiens
  source 1..21: mol_type = other RNA
tgttcatgtagatgtttaagc

SEQ ID NO: 63 - RNA, 21 nt, Homo sapiens
  source 1..21: mol_type = other RNA
ccccacctcctctctcctcag

SEQ ID NO: 64 - RNA, 19 nt, Homo sapiens
  source 1..19: mol_type = other RNA
gtgaggactcgggaggtgg

SEQ ID NO: 65 - RNA, 22 nt, Homo sapiens
  source 1..22: mol_type = other RNA
tcaccagccctgtgttccctag

SEQ ID NO: 66 - RNA, 20 nt, Homo sapiens
  source 1..20: mol_type = other RNA
tcacacctgcctcgcccccc

SEQ ID NO: 67 - RNA, 20 nt, Homo sapiens
  source 1..20: mol_type = other RNA
tgagccctgtcctcccgcag

SEQ ID NO: 68 - RNA, 22 nt, Homo sapiens
  source 1..22: mol_type = other RNA
tcggcctgaccacccaccccac

SEQ ID NO: 69 - RNA, 22 nt, Homo sapiens
  source 1..22: mol_type = other RNA
cctcttccccttgtctctccag

SEQ ID NO: 70 - RNA, 26 nt, Homo sapiens
  source 1..26: mol_type = other RNA
aagtagttggtttgtatgagatggtt

SEQ ID NO: 71 - RNA, 21 nt, Homo sapiens
  source 1..21: mol_type = other RNA
aagtgatctaaaggcctacat

SEQ ID NO: 72 - RNA, 22 nt, Homo sapiens
  source 1..22: mol_type = other RNA
tcagatgatctaaaggcctata

SEQ ID NO: 73 - RNA, 21 nt, Homo sapiens
  source 1..21: mol_type = other RNA
taggcctttagatcacttaaa

SEQ ID NO: 74 - RNA, 19 nt, Homo sapiens
  source 1..19: mol_type = other RNA
aatggatttttggagcagg

SEQ ID NO: 75 - RNA, 22 nt, Homo sapiens
  source 1..22: mol_type = other RNA
acccgtcccgttcgtccccgga

SEQ ID NO: 76 - RNA, 27 nt, Homo sapiens
  source 1..27: mol_type = other RNA
accttcttgtataagcactgtgctaaa

SEQ ID NO: 77 - RNA, 22 nt, Homo sapiens
  source 1..22: mol_type = other RNA
acgcccttcccccccttcttca

SEQ ID NO: 78 - RNA, 24 nt, Homo sapiens
  source 1..24: mol_type = other RNA
aggagggaggagatgggccaagtt

SEQ ID NO: 79 - RNA, 21 nt, Homo sapiens
  source 1..21: mol_type = other RNA
acggtgctggatgtggccttt

SEQ ID NO: 80 - RNA, 22 nt, Homo sapiens
  source 1..22: mol_type = other RNA
agaaggaaattgaattcattta

SEQ ID NO: 81 - RNA, 21 nt, Homo sapiens
  source 1..21: mol_type = other RNA
agagaagaagatcagcctgca

SEQ ID NO: 82 - RNA, 24 nt, Homo sapiens
  source 1..24: mol_type = other RNA
agcctggaagctggagcctgcagt

SEQ ID NO: 83 - RNA, 23 nt, Homo sapiens
  source 1..23: mol_type = other RNA
aggatgagcaaagaaagtagatt

SEQ ID NO: 84 - RNA, 22 nt, Homo sapiens
  source 1..22: mol_type = other RNA
cggatgagcaaagaaagtggtt

SEQ ID NO: 85 - RNA, 21 nt, Homo sapiens
  source 1..21: mol_type = other RNA
agtgaatgatgggttctgacc

SEQ ID NO: 86 - RNA, 21 nt, Homo sapiens
  source 1..21: mol_type = other RNA
agttaggattaggtcgtggaa

SEQ ID NO: 87 - RNA, 22 nt, Homo sapiens
  source 1..22: mol_type = other RNA
acaggtgaggttcttgggagcc

SEQ ID NO: 88 - RNA, 22 nt, Homo sapiens
  source 1..22: mol_type = other RNA
tccctgagaccctaacttgtga

SEQ ID NO: 89 - RNA, 18 nt, Homo sapiens
  source 1..18: mol_type = other RNA
atcccacctctgccacca

SEQ ID NO: 90 - RNA, 19 nt, Homo sapiens
  source 1..19: mol_type = other RNA
atcccaccactgccaccat

SEQ ID NO: 91 - RNA, 19 nt, Homo sapiens
  source 1..19: mol_type = other RNA
atggataaggctttggctt

SEQ ID NO: 92 - RNA, 22 nt, Homo sapiens
  source 1..22: mol_type = other RNA
atgggtgaatttgtagaaggat

SEQ ID NO: 93 - RNA, 23 nt, Homo sapiens
  source 1..23: mol_type = other RNA
caagtcttatttgagcacctgtt

SEQ ID NO: 94 - RNA, 23 nt, Homo sapiens
  source 1..23: mol_type = other RNA
cctcagggctgtagaacagggct

SEQ ID NO: 95 - RNA, 18 nt, Homo sapiens
  source 1..18: mol_type = other RNA
cgggcgtggtggtggggg

SEQ ID NO: 96 - RNA, 20 nt, Homo sapiens
  source 1..20: mol_type = other RNA
cgggcgtggtggtgggggtg

SEQ ID NO: 97 - RNA, 22 nt, Homo sapiens
  source 1..22: mol_type = other RNA
ctggactgagccgtgctactgg

SEQ ID NO: 98 - RNA, 22 nt, Homo sapiens
  source 1..22: mol_type = other RNA
ctggactgagccatgctactgg

SEQ ID NO: 99 - RNA, 23 nt, Homo sapiens
  source 1..23: mol_type = other RNA
ctggagatatggaagagctgtgt

SEQ ID NO: 100 - RNA, 22 nt, Homo sapiens
  source 1..22: mol_type = other RNA
agtgcctgctatgtgccaggca

SEQ ID NO: 101 - RNA, 22 nt, Homo sapiens
  source 1..22: mol_type = other RNA
cttggcacctagcaagcactca

SEQ ID NO: 102 - RNA, 26 nt, Homo sapiens
  source 1..26: mol_type = other RNA
gatgatgatggcagcaaattctgaaa

SEQ ID NO: 103 - RNA, 22 nt, Homo sapiens
  source 1..22: mol_type = other RNA
ggcgacaaaacgagaccctgtc

SEQ ID NO: 104 - RNA, 17 nt, Homo sapiens
  source 1..17: mol_type = other RNA
gtgggggagaggctgtc

SEQ ID NO: 105 - RNA, 22 nt, Homo sapiens
  source 1..22: mol_type = other RNA
ctgaagctcagagggctctgat

SEQ ID NO: 106 - RNA, 20 nt, Homo sapiens
  source 1..20: mol_type = other RNA
taaagagccctgtggagaca

SEQ ID NO: 107 - RNA, 22 nt, Homo sapiens
  source 1..22: mol_type = other RNA
tacgtagatatatatgtatttt

SEQ ID NO: 108 - RNA, 22 nt, Homo sapiens
  source 1..22: mol_type = other RNA
tagtactgtgcatatcatctat

SEQ ID NO: 109 - RNA, 17 nt, Homo sapiens
  source 1..17: mol_type = other RNA
tcatattgcttctttct

SEQ ID NO: 110 - RNA, 17 nt, Homo sapiens
  source 1..17: mol_type = other RNA
tcgcctcctcctctccc

SEQ ID NO: 111 - RNA, 23 nt, Homo sapiens
  source 1..23: mol_type = other RNA
cggggccgtagcactgtctgaga

SEQ ID NO: 112 - RNA, 23 nt, Homo sapiens
  source 1..23: mol_type = other RNA
gggggccgatacactgtacgaga

SEQ ID NO: 113 - RNA, 22 nt, Homo sapiens
  source 1..22: mol_type = other RNA
tctacaaaggaaagcgctttct

SEQ ID NO: 114 - RNA, 22 nt, Homo sapiens
  source 1..22: mol_type = other RNA
tctgggcaacaaagtgagacct

SEQ ID NO: 115 - RNA, 21 nt, Homo sapiens
  source 1..21: mol_type = other RNA
gatctcactttgttgcccagg

SEQ ID NO: 116 - RNA, 21 nt, Homo sapiens
  source 1..21: mol_type = other RNA
tgcaggaccaagatgagccct

SEQ ID NO: 117 - RNA, 22 nt, Homo sapiens
  source 1..22: mol_type = other RNA
ctctagccacagatgcagtgat

SEQ ID NO: 118 - RNA, 22 nt, Homo sapiens
  source 1..22: mol_type = other RNA
tgctggatcagtggttcgagtc

SEQ ID NO: 119 - RNA, 21 nt, Homo sapiens
  source 1..21: mol_type = other RNA
tggactgccctgatctggaga

SEQ ID NO: 120 - RNA, 23 nt, Homo sapiens
  source 1..23: mol_type = other RNA
tggagtccaggaatctgcatttt

SEQ ID NO: 121 - RNA, 19 nt, Homo sapiens
  source 1..19: mol_type = other RNA
tggatttttggatcaggga

SEQ ID NO: 122 - RNA, 24 nt, Homo sapiens
  source 1..24: mol_type = other RNA
tggccctgactgaagaccagcagt

SEQ ID NO: 123 - RNA, 22 nt, Homo sapiens
  source 1..22: mol_type = other RNA
aagcccttaccccaaaaagcat

SEQ ID NO: 124 - RNA, 22 nt, Homo sapiens
  source 1..22: mol_type = other RNA
tgggtggtctggagatttgtgc

SEQ ID NO: 125 - RNA, 21 nt, Homo sapiens
  source 1..21: mol_type = other RNA
ttaggccgcagatctgggtga

SEQ ID NO: 126 - RNA, 22 nt, Homo sapiens
  source 1..22: mol_type = other RNA
gagtggggcttcgaccctaacc

SEQ ID NO: 127 - RNA, 22 nt, Homo sapiens
  source 1..22: mol_type = other RNA
ttagggccctggctccatctcc

SEQ ID NO: 128 - RNA, 17 nt, Homo sapiens
  source 1..17: mol_type = other RNA
ttcaagtaattcaggtg

SEQ ID NO: 129 - RNA, 22 nt, Homo sapiens
  source 1..22: mol_type = other RNA
ttcattcggctgtccagatgta

SEQ ID NO: 130 - RNA, 22 nt, Homo sapiens
  source 1..22: mol_type = other RNA
ttctggaattctgtgtgaggga

SEQ ID NO: 131 - RNA, 24 nt, Homo sapiens
  source 1..24: mol_type = other RNA
ttgcagctgcctgggagtgacttc

SEQ ID NO: 132 - RNA, 21 nt, Homo sapiens
  source 1..21: mol_type = other RNA
ttgggacatacttatgctaaa

SEQ ID NO: 133 - RNA, 22 nt, Homo sapiens
  source 1..22: mol_type = other RNA
tttagagacggggtcttgctct

SEQ ID NO: 134 - RNA, 22 nt, Homo sapiens
  source 1..22: mol_type = other RNA
tctcactgtagcctcgaacccc

SEQ ID NO: 135 - RNA, 22 nt, Homo sapiens
  source 1..22: mol_type = other RNA
tttgaggctacagtgagatgtg

SEQ ID NO: 136 - RNA, 22 nt, Homo sapiens
  source 1..22: mol_type = other RNA
ttttcaactctaatgggagaga

SEQ ID NO: 137 - RNA, 18 nt, Homo sapiens
  source 1..18: mol_type = other RNA
acgttggctctggtggtg

SEQ ID NO: 138 - RNA, 22 nt, Homo sapiens
  source 1..22: mol_type = other RNA
ccacctcccctgcaaacgtcca

SEQ ID NO: 139 - RNA, 22 nt, Homo sapiens
  source 1..22: mol_type = other RNA
actcggcgtggcgtcggtcgtg

SEQ ID NO: 140 - RNA, 21 nt, Homo sapiens
  source 1..21: mol_type = other RNA
tcgaccggacctcgaccggct

SEQ ID NO: 141 - RNA, 22 nt, Homo sapiens
  source 1..22: mol_type = other RNA
cagtgcaatgttaaaagggcat

SEQ ID NO: 142 - RNA, 22 nt, Homo sapiens
  source 1..22: mol_type = other RNA
cagtgcaatgatgaaagggcat

SEQ ID NO: 143 - RNA, 19 nt, Homo sapiens
  source 1..19: mol_type = other RNA
gatgatgctgctgatgctg

SEQ ID NO: 144 - RNA, 22 nt, Homo sapiens
  source 1..22: mol_type = other RNA
tcaaaactgaggggcattttct

SEQ ID NO: 145 - RNA, 22 nt, Homo sapiens
  source 1..22: mol_type = other RNA
taacagtctacagccatggtcg

SEQ ID NO: 146 - RNA, 22 nt, Homo sapiens
  source 1..22: mol_type = other RNA
agctggtaaaatggaaccaaat

SEQ ID NO: 147 - RNA, 22 nt, Homo sapiens
  source 1..22: mol_type = other RNA
tgtgactggttgaccagagggg

SEQ ID NO: 148 - RNA, 23 nt, Homo sapiens
  source 1..23: mol_type = other RNA
tatggctttttattcctatgtga

SEQ ID NO: 149 - RNA, 23 nt, Homo sapiens
  source 1..23: mol_type = other RNA
tatggcttttcattcctatgtga

SEQ ID NO: 150 - RNA, 23 nt, Homo sapiens
  source 1..23: mol_type = other RNA
actccatttgttttgatgatgga

SEQ ID NO: 151 - RNA, 23 nt, Homo sapiens
  source 1..23: mol_type = other RNA
agctggtgttgtgaatcaggccg

SEQ ID NO: 152 - RNA, 23 nt, Homo sapiens
  source 1..23: mol_type = other RNA
tggagacgcggccctgttggagt

SEQ ID NO: 153 - RNA, 23 nt, Homo sapiens
  source 1..23: mol_type = other RNA
tctacagtgcacgtgtctccagt

SEQ ID NO: 154 - RNA, 21 nt, Homo sapiens
  source 1..21: mol_type = other RNA
taccacagggtagaaccacgg

SEQ ID NO: 155 - RNA, 22 nt, Homo sapiens
  source 1..22: mol_type = other RNA
cagtggttttaccctatggtag

SEQ ID NO: 156 - RNA, 22 nt, Homo sapiens
  source 1..22: mol_type = other RNA
taacactgtctggtaaagatgg

SEQ ID NO: 157 - RNA, 23 nt, Homo sapiens
  source 1..23: mol_type = other RNA
tgtagtgtttcctactttatgga

SEQ ID NO: 158 - RNA, 21 nt, Homo sapiens
  source 1..21: mol_type = other RNA
cataaagtagaaagcactact

SEQ ID NO: 159 - RNA, 20 nt, Homo sapiens
  source 1..20: mol_type = other RNA
tacagtatagatgatgtact

SEQ ID NO: 160 - RNA, 22 nt, Homo sapiens
  source 1..22: mol_type = other RNA
ctcggcgcggggcgcgggctcc

SEQ ID NO: 161 - RNA, 22 nt, Homo sapiens
  source 1..22: mol_type = other RNA
tgagaactgaattccatgggtt

SEQ ID NO: 162 - RNA, 22 nt, Homo sapiens
  source 1..22: mol_type = other RNA
tgccctgtggactcagttctgg

SEQ ID NO: 163 - RNA, 22 nt, Homo sapiens
  source 1..22: mol_type = other RNA
tgagaactgaattccataggct

SEQ ID NO: 164 - RNA, 20 nt, Homo sapiens
  source 1..20: mol_type = other RNA
gtgtgtggaaatgcttctgc

SEQ ID NO: 165 - RNA, 22 nt, Homo sapiens
  source 1..22: mol_type = other RNA
gtgtgcggaaatgcttctgcta

SEQ ID NO: 166 - RNA, 22 nt, Homo sapiens
  source 1..22: mol_type = other RNA
tcagtgcactacagaactttgt

SEQ ID NO: 167 - RNA, 22 nt, Homo sapiens
  source 1..22: mol_type = other RNA
tcagtgcatcacagaactttgt

SEQ ID NO: 168 - RNA, 23 nt, Homo sapiens
  source 1..23: mol_type = other RNA
tctggctccgtgtcttcactccc

SEQ ID NO: 169 - RNA, 22 nt, Homo sapiens
  source 1..22: mol_type = other RNA
tctcccaacccttgtaccagtg

SEQ ID NO: 170 - RNA, 21 nt, Homo sapiens
  source 1..21: mol_type = other RNA
ctagactgaagctccttgagg

SEQ ID NO: 171 - RNA, 21 nt, Homo sapiens
  source 1..21: mol_type = other RNA
tcgaggagctcacagtctagt

SEQ ID NO: 172 - RNA, 18 nt, Homo sapiens
  source 1..18: mol_type = other RNA
tcgaggagctcacagtct

SEQ ID NO: 173 - RNA, 21 nt, Homo sapiens
  source 1..21: mol_type = other RNA
tcagtgcatgacagaacttgg

SEQ ID NO: 174 - RNA, 23 nt, Homo sapiens
  source 1..23: mol_type = other RNA
aggttctgtgatacactccgact

SEQ ID NO: 175 - RNA, 22 nt, Homo sapiens
  source 1..22: mol_type = other RNA
ttgcatagtcacaaaagtgatc

SEQ ID NO: 176 - RNA, 22 nt, Homo sapiens
  source 1..22: mol_type = other RNA
aaaaccgtctagttacagttgt

SEQ ID NO: 177 - RNA, 22 nt, Homo sapiens
  source 1..22: mol_type = other RNA
taggttatccgtgttgccttcg

SEQ ID NO: 178 - RNA, 23 nt, Homo sapiens
  source 1..23: mol_type = other RNA
ttaatgctaatcgtgataggggt

SEQ ID NO: 179 - RNA, 22 nt, Homo sapiens
  source 1..22: mol_type = other RNA
tagcagcacataatggtttgtg

SEQ ID NO: 180 - RNA, 22 nt, Homo sapiens
  source 1..22: mol_type = other RNA
tagcagcacatcatggtttaca

SEQ ID NO: 181 - RNA, 22 nt, Homo sapiens
  source 1..22: mol_type = other RNA
acatacttctttatatgcccat

SEQ ID NO: 182 - RNA, 22 nt, Homo sapiens
  source 1..22: mol_type = other RNA
tagcagcacgtaaatattggcg

SEQ ID NO: 183 - RNA, 22 nt, Homo sapiens
  source 1..22: mol_type = other RNA
accactgaccgttgactgtacc

SEQ ID NO: 184 - RNA, 22 nt, Homo sapiens
  source 1..22: mol_type = other RNA
accatcgaccgttgattgtacc

SEQ ID NO: 185 - RNA, 23 nt, Homo sapiens
  source 1..23: mol_type = other RNA
aacattcaacgctgtcggtgagt

SEQ ID NO: 186 - RNA, 20 nt, Homo sapiens
  source 1..20: mol_type = other RNA
ctcactgatcaatgaatgca

SEQ ID NO: 187 - RNA, 23 nt, Homo sapiens
  source 1..23: mol_type = other RNA
aacattcattgctgtcggtgggt

SEQ ID NO: 188 - RNA, 22 nt, Homo sapiens
  source 1..22: mol_type = other RNA
aacattcaacctgtcggtgagt

SEQ ID NO: 189 - RNA, 21 nt, Homo sapiens
  source 1..21: mol_type = other RNA
ccaccgggggatgaatgtcac

SEQ ID NO: 190 - RNA, 21 nt, Homo sapiens
  source 1..21: mol_type = other RNA
tggttctagacttgccaacta

SEQ ID NO: 191 - RNA, 24 nt, Homo sapiens
  source 1..24: mol_type = other RNA
tttggcaatggtagaactcacact

SEQ ID NO: 192 - RNA, 18 nt, Homo sapiens
  source 1..18: mol_type = other RNA
tgaggcagtagattgaat

SEQ ID NO: 193 - RNA, 22 nt, Homo sapiens
  source 1..22: mol_type = other RNA
tatggcactggtagaattcact

SEQ ID NO: 194 - RNA, 22 nt, Homo sapiens
  source 1..22: mol_type = other RNA
tggagagaaaggcagttcctga

SEQ ID NO: 195 - RNA, 22 nt, Homo sapiens
  source 1..22: mol_type = other RNA
caaagaattctccttttgggct

SEQ ID NO: 196 - RNA, 22 nt, Homo sapiens
  source 1..22: mol_type = other RNA
tcgtgtcttgtgttgcagccgg

SEQ ID NO: 197 - RNA, 21 nt, Homo sapiens
  source 1..21: mol_type = other RNA
ctcccacatgcagggtttgca

SEQ ID NO: 198 - RNA, 21 nt, Homo sapiens
  source 1..21: mol_type = other RNA
catcccttgcatggtggaggg

SEQ ID NO: 199 - RNA, 23 nt, Homo sapiens
  source 1..23: mol_type = other RNA
taaggtgcatctagtgcagatag

SEQ ID NO: 200 - RNA, 23 nt, Homo sapiens
  source 1..23: mol_type = other RNA
taaggtgcatctagtgcagttag

SEQ ID NO: 201 - RNA, 21 nt, Homo sapiens
  source 1..21: mol_type = other RNA
ccggccgccggctccgccccg

SEQ ID NO: 202 - RNA, 21 nt, Homo sapiens
  source 1..21: mol_type = other RNA
cggcggggacggcgattggtc

SEQ ID NO: 203 - RNA, 22 nt, Homo sapiens
  source 1..22: mol_type = other RNA
cgcaggggccgggtgctcaccg

SEQ ID NO: 204 - RNA, 21 nt, Homo sapiens
  source 1..21: mol_type = other RNA
ctatatatcaaacatattcct

SEQ ID NO: 205 - RNA, 22 nt, Homo sapiens
  source 1..22: mol_type = other RNA
tgatatgtttgatatattaggt

SEQ ID NO: 206 - RNA, 21 nt, Homo sapiens
  source 1..21: mol_type = other RNA
tgatatgtttgatattgggtt

SEQ ID NO: 207 - RNA, 20 nt, Homo sapiens
  source 1..20: mol_type = other RNA
gaggcagaagcaggatgaca

SEQ ID NO: 208 - RNA, 21 nt, Homo sapiens
  source 1..21: mol_type = other RNA
ccagtcctgtgcctgccgcct

SEQ ID NO: 209 - RNA, 20 nt, Homo sapiens
  source 1..20: mol_type = other RNA
ccccagggcgacgcggcggg

SEQ ID NO: 210 - RNA, 23 nt, Homo sapiens
  source 1..23: mol_type = other RNA
caacggaatcccaaaagcagctg

SEQ ID NO: 211 - RNA, 21 nt, Homo sapiens
  source 1..21: mol_type = other RNA
ctgacctatgaattgacagcc

SEQ ID NO: 212 - RNA, 22 nt, Homo sapiens
  source 1..22: mol_type = other RNA
aactggcctacaaagtcccagt

SEQ ID NO: 213 - RNA, 22 nt, Homo sapiens
  source 1..22: mol_type = other RNA
tgggtctttgcgggcgagatga

SEQ ID NO: 214 - RNA, 22 nt, Homo sapiens
  source 1..22: mol_type = other RNA
aactggccctcaaagtcccgct

SEQ ID NO: 215 - RNA, 22 nt, Homo sapiens
  source 1..22: mol_type = other RNA
tgtaacagcaactccatgtgga

SEQ ID NO: 216 - RNA, 21 nt, Homo sapiens
  source 1..21: mol_type = other RNA
tagcagcacagaaatattggc

SEQ ID NO: 217 - RNA, 22 nt, Homo sapiens
  source 1..22: mol_type = other RNA
cggcaacaagaaactgcctgag

SEQ ID NO: 218 - RNA, 22 nt, Homo sapiens
  source 1..22: mol_type = other RNA
taggtagtttcatgttgttggg

SEQ ID NO: 219 - RNA, 22 nt, Homo sapiens
  source 1..22: mol_type = other RNA
taggtagtttcctgttgttggg

SEQ ID NO: 220 - RNA, 22 nt, Homo sapiens
  source 1..22: mol_type = other RNA
tcaggccaggcacagtggctca

SEQ ID NO: 221 - RNA, 19 nt, Homo sapiens
  source 1..19: mol_type = other RNA
accgtgcaaaggtagcata

SEQ ID NO: 222 - RNA, 22 nt, Homo sapiens
  source 1..22: mol_type = other RNA
ttcaccaccttctccacccagc

SEQ ID NO: 223 - RNA, 23 nt, Homo sapiens
  source 1..23: mol_type = other RNA
cgggtagagagggcagtgggagg

SEQ ID NO: 224 - RNA, 20 nt, Homo sapiens
  source 1..20: mol_type = other RNA
cctcctgccctccttgctgt

SEQ ID NO: 225 - RNA, 22 nt, Homo sapiens
  source 1..22: mol_type = other RNA
ggtccagaggggagataggttc

SEQ ID NO: 226 - RNA, 23 nt, Homo sapiens
  source 1..23: mol_type = other RNA
cccagtgtttagactatctgttc

SEQ ID NO: 227 - RNA, 23 nt, Homo sapiens
  source 1..23: mol_type = other RNA
tgtgcaaatctatgcaaaactga

SEQ ID NO: 228 - RNA, 23 nt, Homo sapiens
  source 1..23: mol_type = other RNA
tgtgcaaatccatgcaaaactga

SEQ ID NO: 229 - RNA, 22 nt, Homo sapiens
  source 1..22: mol_type = other RNA
taacactgtctggtaacgatgt

SEQ ID NO: 230 - RNA, 22 nt, Homo sapiens
  source 1..22: mol_type = other RNA
taatactgcctggtaatgatga

SEQ ID NO: 231 - RNA, 23 nt, Homo sapiens
  source 1..23: mol_type = other RNA
taatactgccgggtaatgatgga

SEQ ID NO: 232 - RNA, 20 nt, Homo sapiens
  source 1..20: mol_type = other RNA
agaggtatagggcatgggaa

SEQ ID NO: 233 - RNA, 22 nt, Homo sapiens
  source 1..22: mol_type = other RNA
gtgaaatgtttaggaccactag

SEQ ID NO: 234 - RNA, 25 nt, Homo sapiens
  source 1..25: mol_type = other RNA
agtggttcttaacagttcaacagtt

SEQ ID NO: 235 - RNA, 23 nt, Homo sapiens
  source 1..23: mol_type = other RNA
gtgttaattaaacctctatttac

SEQ ID NO: 236 - RNA, 22 nt, Homo sapiens
  source 1..22: mol_type = other RNA
tccttcattccaccggagtctg

SEQ ID NO: 237 - RNA, 22 nt, Homo sapiens
  source 1..22: mol_type = other RNA
tggaatgtaaggaagtgtgtgg

SEQ ID NO: 238 - RNA, 22 nt, Homo sapiens
  source 1..22: mol_type = other RNA
ataagacgagcaaaaagcttgt

SEQ ID NO: 239 - RNA, 22 nt, Homo sapiens
  source 1..22: mol_type = other RNA
aagctttttgctcgaattatgt

SEQ ID NO: 240 - RNA, 23 nt, Homo sapiens
  source 1..23: mol_type = other RNA
taaagtgcttatagtgcaggtag

SEQ ID NO: 241 - RNA, 22 nt, Homo sapiens
  source 1..22: mol_type = other RNA
ctgtgcgtgtgacagcggctga

SEQ ID NO: 242 - RNA, 22 nt, Homo sapiens
  source 1..22: mol_type = other RNA
agcccctgcccaccgcacactg

SEQ ID NO: 243 - RNA, 22 nt, Homo sapiens
  source 1..22: mol_type = other RNA
ttggggaaacggccgctgagtg

SEQ ID NO: 244 - RNA, 21 nt, Homo sapiens
  source 1..21: mol_type = other RNA
atttgtgcttggctctgtcac

SEQ ID NO: 245 - RNA, 21 nt, Homo sapiens
  source 1..21: mol_type = other RNA
gcagggacagcaaaggggtgc

SEQ ID NO: 246 - RNA, 22 nt, Homo sapiens
  source 1..22: mol_type = other RNA
ttccctttgtcatccttcgcct

SEQ ID NO: 247 - RNA, 21 nt, Homo sapiens
  source 1..21: mol_type = other RNA
ggttcttagcataggaggtct

SEQ ID NO: 248 - RNA, 21 nt, Homo sapiens
  source 1..21: mol_type = other RNA
tgttctctttgccaaggacag

SEQ ID NO: 249 - RNA, 21 nt, Homo sapiens
  source 1..21: mol_type = other RNA
taacagtctccagtcacggcc

SEQ ID NO: 250 - RNA, 21 nt, Homo sapiens
  source 1..21: mol_type = other RNA
atgacctatgaattgacagac

SEQ ID NO: 251 - RNA, 22 nt, Homo sapiens
  source 1..22: mol_type = other RNA
tagcttatcagactgatgttga

SEQ ID NO: 252 - RNA, 22 nt, Homo sapiens
  source 1..22: mol_type = other RNA
taatctcagctggcaactgtga

SEQ ID NO: 253 - RNA, 22 nt, Homo sapiens
  source 1..22: mol_type = other RNA
aaatctctgcaggcaaatgtga

SEQ ID NO: 254 - RNA, 21 nt, Homo sapiens
  source 1..21: mol_type = other RNA
ttgtgcttgatctaaccatgt

SEQ ID NO: 255 - RNA, 22 nt, Homo sapiens
  source 1..22: mol_type = other RNA
agagttgagtctggacgtcccg

SEQ ID NO: 256 - RNA, 22 nt, Homo sapiens
  source 1..22: mol_type = other RNA
agaattgtggctggacatctgt

SEQ ID NO: 257 - RNA, 23 nt, Homo sapiens
  source 1..23: mol_type = other RNA
agaattgcgtttggacaatcagt

SEQ ID NO: 258 - RNA, 23 nt, Homo sapiens
  source 1..23: mol_type = other RNA
agctacattgtctgctgggtttc

SEQ ID NO: 259 - RNA, 22 nt, Homo sapiens
  source 1..22: mol_type = other RNA
acctggcatacaatgtagattt

SEQ ID NO: 260 - RNA, 21 nt, Homo sapiens
  source 1..21: mol_type = other RNA
agctacatctggctactgggt

SEQ ID NO: 261 - RNA, 22 nt, Homo sapiens
  source 1..22: mol_type = other RNA
aagctgccagttgaagaactgt

SEQ ID NO: 262 - RNA, 21 nt, Homo sapiens
  source 1..21: mol_type = other RNA
caagtcactagtggttccgtt

SEQ ID NO: 263 - RNA, 22 nt, Homo sapiens
  source 1..22: mol_type = other RNA
gagagcagtgtgtgttgcctgg

SEQ ID NO: 264 - RNA, 21 nt, Homo sapiens
  source 1..21: mol_type = other RNA
atcacattgccagggatttcc

SEQ ID NO: 265 - RNA, 21 nt, Homo sapiens
  source 1..21: mol_type = other RNA
atcacattgccagggattacc

SEQ ID NO: 266 - RNA, 22 nt, Homo sapiens
  source 1..22: mol_type = other RNA
atcacattgccagtgattaccc

SEQ ID NO: 267 - RNA, 22 nt, Homo sapiens
  source 1..22: mol_type = other RNA
tggctcagttcagcaggaacag

SEQ ID NO: 268 - RNA, 22 nt, Homo sapiens
  source 1..22: mol_type = other RNA
cattgcacttgtctcggtctga

SEQ ID NO: 269 - RNA, 21 nt, Homo sapiens
  source 1..21: mol_type = other RNA
aggcggagacttgggcaattg

SEQ ID NO: 270 - RNA, 23 nt, Homo sapiens
  source 1..23: mol_type = other RNA
caggcagtgactgttcagacgtc

SEQ ID NO: 271 - RNA, 22 nt, Homo sapiens
  source 1..22: mol_type = other RNA
ttcaagtaatccaggataggct

SEQ ID NO: 272 - RNA, 21 nt, Homo sapiens
  source 1..21: mol_type = other RNA
ttcaagtaattcaggataggt

SEQ ID NO: 273 - RNA, 21 nt, Homo sapiens
  source 1..21: mol_type = other RNA
ttcacagtggctaagttccgc

SEQ ID NO: 274 - RNA, 21 nt, Homo sapiens
  source 1..21: mol_type = other RNA
ttcacagtggctaagttctgc

SEQ ID NO: 275 - RNA, 22 nt, Homo sapiens
  source 1..22: mol_type = other RNA
cactagattgtgagctcctgga

SEQ ID NO: 276 - RNA, 22 nt, Homo sapiens
  source 1..22: mol_type = other RNA
aaggagctcacagtctattgag

SEQ ID NO: 277 - RNA, 22 nt, Homo sapiens
  source 1..22: mol_type = other RNA
gagggttgggtggaggctctcc

SEQ ID NO: 278 - RNA, 21 nt, Homo sapiens
  source 1..21: mol_type = other RNA
agggccccccctcaatcctgt

SEQ ID NO: 279 - RNA, 21 nt, Homo sapiens
  source 1..21: mol_type = other RNA
atgtatgtgtgcatgtgcatg

SEQ ID NO: 280 - RNA, 24 nt, Homo sapiens
  source 1..24: mol_type = other RNA
agcagaagcagggaggttctccca

SEQ ID NO: 281 - RNA, 22 nt, Homo sapiens
  source 1..22: mol_type = other RNA
tatgtgggatggtaaaccgctt

SEQ ID NO: 282 - RNA, 22 nt, Homo sapiens
  source 1..22: mol_type = other RNA
tggtttaccgtcccacatacat

SEQ ID NO: 283 - RNA, 22 nt, Homo sapiens
  source 1..22: mol_type = other RNA
tagcaccatctgaaatcggtta

SEQ ID NO: 284 - RNA, 23 nt, Homo sapiens
  source 1..23: mol_type = other RNA
tagcaccatttgaaatcagtgtt

SEQ ID NO: 285 - RNA, 22 nt, Homo sapiens
  source 1..22: mol_type = other RNA
tagcaccatttgaaatcggtta

SEQ ID NO: 286 - RNA, 22 nt, Homo sapiens
  source 1..22: mol_type = other RNA
tatacaagggcagactctctct

SEQ ID NO: 287 - RNA, 23 nt, Homo sapiens
  source 1..23: mol_type = other RNA
cagtgcaatagtattgtcaaagc

SEQ ID NO: 288 - RNA, 22 nt, Homo sapiens
  source 1..22: mol_type = other RNA
gctctgactttattgcactact

SEQ ID NO: 289 - RNA, 23 nt, Homo sapiens
  source 1..23: mol_type = other RNA
cagtgcaatgatattgtcaaagc

SEQ ID NO: 290 - RNA, 22 nt, Homo sapiens
  source 1..22: mol_type = other RNA
gctctgacgaggttgcactact

SEQ ID NO: 291 - RNA, 23 nt, Homo sapiens
  source 1..23: mol_type = other RNA
taagtgcttccatgttttggtga

SEQ ID NO: 292 - RNA, 23 nt, Homo sapiens
  source 1..23: mol_type = other RNA
acttaaacgtggatgtacttgct

SEQ ID NO: 293 - RNA, 23 nt, Homo sapiens
  source 1..23: mol_type = other RNA
taagtgcttccatgttttagtag

SEQ ID NO: 294 - RNA, 23 nt, Homo sapiens
  source 1..23: mol_type = other RNA
taagtgcttccatgtttcagtgg

SEQ ID NO: 295 - RNA, 23 nt, Homo sapiens
  source 1..23: mol_type = other RNA
taagtgcttccatgtttgagtgt

SEQ ID NO: 296 - RNA, 17 nt, Homo sapiens
  source 1..17: mol_type = other RNA
taagtgcttccatgctt

SEQ ID NO: 297 - RNA, 17 nt, Homo sapiens
  source 1..17: mol_type = other RNA
taattgcttccatgttt

SEQ ID NO: 298 - RNA, 23 nt, Homo sapiens
  source 1..23: mol_type = other RNA
tcagcaccaggatattgttggag

SEQ ID NO: 299 - RNA, 23 nt, Homo sapiens
  source 1..23: mol_type = other RNA
tcaacaaaatcactgatgctgga

SEQ ID NO: 300 - RNA, 22 nt, Homo sapiens
  source 1..22: mol_type = other RNA
gatatcagctcagtaggcaccg

SEQ ID NO: 301 - RNA, 22 nt, Homo sapiens
  source 1..22: mol_type = other RNA
ctttcagtcggatgtttgcagc

SEQ ID NO: 302 - RNA, 22 nt, Homo sapiens
  source 1..22: mol_type = other RNA
tgtaaacatcctcgactggaag

SEQ ID NO: 303 - RNA, 22 nt, Homo sapiens
  source 1..22: mol_type = other RNA
tgtaaacatcctacactcagct

SEQ ID NO: 304 - RNA, 23 nt, Homo sapiens
  source 1..23: mol_type = other RNA
tgtaaacatcctacactctcagc

SEQ ID NO: 305 - RNA, 22 nt, Homo sapiens
  source 1..22: mol_type = other RNA
tgtaaacatccccgactggaag

SEQ ID NO: 306 - RNA, 22 nt, Homo sapiens
  source 1..22: mol_type = other RNA
ctttcagtcggatgtttacagc

SEQ ID NO: 307 - RNA, 22 nt, Homo sapiens
  source 1..22: mol_type = other RNA
tgtaaacatccttgactggaag

SEQ ID NO: 308 - RNA, 23 nt, Homo sapiens
  source 1..23: mol_type = other RNA
atcagggcttgtggaatgggaag

SEQ ID NO: 309 - RNA, 21 nt, Homo sapiens
  source 1..21: mol_type = other RNA
gctgcaccggagactgggtaa

SEQ ID NO: 310 - RNA, 23 nt, Homo sapiens
  source 1..23: mol_type = other RNA
tcgaggactggtggaagggcctt

SEQ ID NO: 311 - RNA, 23 nt, Homo sapiens
  source 1..23: mol_type = other RNA
ctgactgaataggtagggtcatt

SEQ ID NO: 312 - RNA, 22 nt, Homo sapiens
  source 1..22: mol_type = other RNA
agcttttgggaattcaggtagt

SEQ ID NO: 313 - RNA, 21 nt, Homo sapiens
  source 1..21: mol_type = other RNA
acctgaattaccaaaagcttt

SEQ ID NO: 314 - RNA, 22 nt, Homo sapiens
  source 1..22: mol_type = other RNA
atatacctgttcggtctcttta

SEQ ID NO: 315 - RNA, 22 nt, Homo sapiens
  source 1..22: mol_type = other RNA
aggggaccaaagagatatatag

SEQ ID NO: 316 - RNA, 24 nt, Homo sapiens
  source 1..24: mol_type = other RNA
ggttgggcagtgaggagggtgtga

SEQ ID NO: 317 - RNA, 21 nt, Homo sapiens
  source 1..21: mol_type = other RNA
tgaggagatcgtcgaggttgg

SEQ ID NO: 318 - RNA, 21 nt, Homo sapiens
  source 1..21: mol_type = other RNA
ggtggggcaatgggatcaggt

SEQ ID NO: 319 - RNA, 22 nt, Homo sapiens
  source 1..22: mol_type = other RNA
aagggcttcctctctgcaggac

SEQ ID NO: 320 - RNA, 21 nt, Homo sapiens
  source 1..21: mol_type = other RNA
aggcaagatgctggcatagct

SEQ ID NO: 321 - RNA, 23 nt, Homo sapiens
  source 1..23: mol_type = other RNA
ctgataagaacagaggcccagat

SEQ ID NO: 322 - RNA, 22 nt, Homo sapiens
  source 1..22: mol_type = other RNA
tgtgactttaagggaaatggcg

SEQ ID NO: 323 - RNA, 17 nt, Homo sapiens
  source 1..17: mol_type = other RNA
gagttctacagtcagac

SEQ ID NO: 324 - RNA, 22 nt, Homo sapiens
  source 1..22: mol_type = other RNA
agaaggggtgaaatttaaacgt

SEQ ID NO: 325 - RNA, 19 nt, Homo sapiens
  source 1..19: mol_type = other RNA
tggggcggagcttccggag

SEQ ID NO: 326 - RNA, 22 nt, Homo sapiens
  source 1..22: mol_type = other RNA
tggggcggagcttccggaggcc

SEQ ID NO: 327 - RNA, 25 nt, Homo sapiens
  source 1..25: mol_type = other RNA
cttccagacgctccgccccacgtcg

SEQ ID NO: 328 - RNA, 17 nt, Homo sapiens
  source 1..17: mol_type = other RNA
gcttctgtagtgtagtc

SEQ ID NO: 329 - RNA, 23 nt, Homo sapiens
  source 1..23: mol_type = other RNA
agaagaaggcggtcggtctgcgg

SEQ ID NO: 330 - RNA, 23 nt, Homo sapiens
  source 1..23: mol_type = other RNA
tgtggaaggtagacggccagaga

SEQ ID NO: 331 - RNA, 23 nt, Homo sapiens
  source 1..23: mol_type = other RNA
tctgggaggttgtagcagtggaa

SEQ ID NO: 332 - RNA, 17 nt, Homo sapiens
  source 1..17: mol_type = other RNA
cgcgccgggcccgggtt

SEQ ID NO: 333 - RNA, 18 nt, Homo sapiens
  source 1..18: mol_type = other RNA
cggggcggcaggggcctc

SEQ ID NO: 334 - RNA, 22 nt, Homo sapiens
  source 1..22: mol_type = other RNA
tggaagggagaagagctttaat

SEQ ID NO: 335 - RNA, 22 nt, Homo sapiens
  source 1..22: mol_type = other RNA
aaaagctgggttgagagggcga

SEQ ID NO: 336 - RNA, 22 nt, Homo sapiens
  source 1..22: mol_type = other RNA
aaaagctgggttgagagggcaa

SEQ ID NO: 337 - RNA, 20 nt, Homo sapiens
  source 1..20: mol_type = other RNA
aaaagctgggttgagagggt

SEQ ID NO: 338 - RNA, 19 nt, Homo sapiens
  source 1..19: mol_type = other RNA
aaaagctgggttgagagga

SEQ ID NO: 339 - RNA, 18 nt, Homo sapiens
  source 1..18: mol_type = other RNA
aaagctgggttgagaagg

SEQ ID NO: 340 - RNA, 21 nt, Homo sapiens
  source 1..21: mol_type = other RNA
cacattacacggtcgacctct

SEQ ID NO: 341 - RNA, 22 nt, Homo sapiens
  source 1..22: mol_type = other RNA
aggtggtccgtggcgcgttcgc

SEQ ID NO: 342 - RNA, 22 nt, Homo sapiens
  source 1..22: mol_type = other RNA
cccaatacacggtcgacctctt

SEQ ID NO: 343 - RNA, 23 nt, Homo sapiens
  source 1..23: mol_type = other RNA
aggttgtccgtggtgagttcgca

SEQ ID NO: 344 - RNA, 20 nt, Homo sapiens
  source 1..20: mol_type = other RNA
actgccccaggtgctgctgg

SEQ ID NO: 345 - RNA, 23 nt, Homo sapiens
  source 1..23: mol_type = other RNA
cgcatcccctagggcattggtgt

SEQ ID NO: 346 - RNA, 23 nt, Homo sapiens
  source 1..23: mol_type = other RNA
cctagtaggtgtccagtaagtgt

SEQ ID NO: 347 - RNA, 22 nt, Homo sapiens
  source 1..22: mol_type = other RNA
tattgcacattactaagttgca

SEQ ID NO: 348 - RNA, 20 nt, Homo sapiens
  source 1..20: mol_type = other RNA
cctctgggcccttcctccag

SEQ ID NO: 349 - RNA, 22 nt, Homo sapiens
  source 1..22: mol_type = other RNA
ctggccctctctgcccttccgt

SEQ ID NO: 350 - RNA, 23 nt, Homo sapiens
  source 1..23: mol_type = other RNA
gggggggcaggaggggctcaggg

SEQ ID NO: 351 - RNA, 22 nt, Homo sapiens
  source 1..22: mol_type = other RNA
aacacacctggttaacctcttt

SEQ ID NO: 352 - RNA, 23 nt, Homo sapiens
  source 1..23: mol_type = other RNA
gaggttttctgggtttctgtttc

SEQ ID NO: 353 - RNA, 23 nt, Homo sapiens
  source 1..23: mol_type = other RNA
gcaaagcacacggcctgcagaga

SEQ ID NO: 354 - RNA, 22 nt, Homo sapiens
  source 1..22: mol_type = other RNA
tctctgggcctgtgtcttaggc

SEQ ID NO: 355 - RNA, 21 nt, Homo sapiens
  source 1..21: mol_type = other RNA
gcccctgggcctatcctagaa

SEQ ID NO: 356 - RNA, 22 nt, Homo sapiens
  source 1..22: mol_type = other RNA
ctaggtatggtcccagggatcc

SEQ ID NO: 357 - RNA, 23 nt, Homo sapiens
  source 1..23: mol_type = other RNA
tcaagagcaataacgaaaaatgt

SEQ ID NO: 358 - RNA, 22 nt, Homo sapiens
  source 1..22: mol_type = other RNA
ctcctatatgatgcctttcttc

SEQ ID NO: 359 - RNA, 21 nt, Homo sapiens
  source 1..21: mol_type = other RNA
gaacggcttcatacaggagtt

SEQ ID NO: 360 - RNA, 22 nt, Homo sapiens
  source 1..22: mol_type = other RNA
aacaatatcctggtgctgagtg

SEQ ID NO: 361 - RNA, 23 nt, Homo sapiens
  source 1..23: mol_type = other RNA
tgagcgcctcgacgacagagccg

SEQ ID NO: 362 - RNA, 23 nt, Homo sapiens
  source 1..23: mol_type = other RNA
tccctgtcctccaggagctcacg

SEQ ID NO: 363 - RNA, 21 nt, Homo sapiens
  source 1..21: mol_type = other RNA
gtgcattgtagttgcattgca

SEQ ID NO: 364 - RNA, 20 nt, Homo sapiens
  source 1..20: mol_type = other RNA
gtgcattgctgttgcattgc

SEQ ID NO: 365 - RNA, 22 nt, Homo sapiens
  source 1..22: mol_type = other RNA
ttataaagcaatgagactgatt

SEQ ID NO: 366 - RNA, 23 nt, Homo sapiens
  source 1..23: mol_type = other RNA
tctcacacagaaatcgcacccgt

SEQ ID NO: 367 - RNA, 21 nt, Homo sapiens
  source 1..21: mol_type = other RNA
aggggtgctatctgtgattga

SEQ ID NO: 368 - RNA, 22 nt, Homo sapiens
  source 1..22: mol_type = other RNA
gccctgaacgaggggtctggag

SEQ ID NO: 369 - RNA, 22 nt, Homo sapiens
  source 1..22: mol_type = other RNA
gctgactcctagtccagggctc

SEQ ID NO: 370 - RNA, 23 nt, Homo sapiens
  source 1..23: mol_type = other RNA
tgtctgcccgcatgcctgcctct

SEQ ID NO: 371 - RNA, 22 nt, Homo sapiens
  source 1..22: mol_type = other RNA
caatcactaactccactgccat

SEQ ID NO: 372 - RNA, 22 nt, Homo sapiens
  source 1..22: mol_type = other RNA
aatcactaaccacacggccagg

SEQ ID NO: 373 - RNA, 23 nt, Homo sapiens
  source 1..23: mol_type = other RNA
aggcagtgtagttagctgattgc

SEQ ID NO: 374 - RNA, 23 nt, Homo sapiens
  source 1..23: mol_type = other RNA
cctccgtgttacctgtcctctag

SEQ ID NO: 375 - RNA, 23 nt, Homo sapiens
  source 1..23: mol_type = other RNA
tgaggatggatagcaaggaagcc

SEQ ID NO: 376 - RNA, 24 nt, Homo sapiens
  source 1..24: mol_type = other RNA
acaaaaaaaaaagcccaacccttc

SEQ ID NO: 377 - RNA, 22 nt, Homo sapiens
  source 1..22: mol_type = other RNA
tgttgtacttttttttttgttc

SEQ ID NO: 378 - RNA, 23 nt, Homo sapiens
  source 1..23: mol_type = other RNA
tcccccaggtgtgattctgattt

SEQ ID NO: 379 - RNA, 23 nt, Homo sapiens
  source 1..23: mol_type = other RNA
tagccttcagatcttggtgtttt

SEQ ID NO: 380 - RNA, 23 nt, Homo sapiens
  source 1..23: mol_type = other RNA
ccacttggatctgaaggctgccc

SEQ ID NO: 381 - RNA, 21 nt, Homo sapiens
  source 1..21: mol_type = other RNA
tctctcggctcctcgcggctc

SEQ ID NO: 382 - RNA, 22 nt, Homo sapiens
  source 1..22: mol_type = other RNA
ttatcagaatctccaggggtac

SEQ ID NO: 383 - RNA, 22 nt, Homo sapiens
  source 1..22: mol_type = other RNA
aacacacctattcaaggattca

SEQ ID NO: 384 - RNA, 24 nt, Homo sapiens
  source 1..24: mol_type = other RNA
aatccttggaacctaggtgtgagt

SEQ ID NO: 385 - RNA, 22 nt, Homo sapiens
  source 1..22: mol_type = other RNA
aattgcacggtatccatctgta

SEQ ID NO: 386 - RNA, 22 nt, Homo sapiens
  source 1..22: mol_type = other RNA
cgggtggatcacgatgcaattt

SEQ ID NO: 387 - RNA, 22 nt, Homo sapiens
  source 1..22: mol_type = other RNA
taatgcccctaaaaatccttat

SEQ ID NO: 388 - RNA, 22 nt, Homo sapiens
  source 1..22: mol_type = other RNA
agggactttcaggggcagctgt

SEQ ID NO: 389 - RNA, 22 nt, Homo sapiens
  source 1..22: mol_type = other RNA
aattgcactttagcaatggtga

SEQ ID NO: 390 - RNA, 23 nt, Homo sapiens
  source 1..23: mol_type = other RNA
acctggacccagcgtagacaaag

SEQ ID NO: 391 - RNA, 21 nt, Homo sapiens
  source 1..21: mol_type = other RNA
aataatacatggttgatcttt

SEQ ID NO: 392 - RNA, 22 nt, Homo sapiens
  source 1..22: mol_type = other RNA
agatcgaccgtgttatattcgc

SEQ ID NO: 393 - RNA, 22 nt, Homo sapiens
  source 1..22: mol_type = other RNA
gcctgctggggtggaacctggt

SEQ ID NO: 394 - RNA, 22 nt, Homo sapiens
  source 1..22: mol_type = other RNA
caggtcacgtctctgcagttac

SEQ ID NO: 395 - RNA, 20 nt, Homo sapiens
  source 1..20: mol_type = other RNA
actcaaactgtgggggcact

SEQ ID NO: 396 - RNA, 22 nt, Homo sapiens
  source 1..22: mol_type = other RNA
actcaaaagatggcggcacttt

SEQ ID NO: 397 - RNA, 23 nt, Homo sapiens
  source 1..23: mol_type = other RNA
aaagtgctgcgacatttgagcgt

SEQ ID NO: 398 - RNA, 23 nt, Homo sapiens
  source 1..23: mol_type = other RNA
gaagtgcttcgattttggggtgt

SEQ ID NO: 399 - RNA, 22 nt, Homo sapiens
  source 1..22: mol_type = other RNA
cttatcagattgtattgtaatt

SEQ ID NO: 400 - RNA, 22 nt, Homo sapiens
  source 1..22: mol_type = other RNA
ttataatacaacctgataagtg

SEQ ID NO: 401 - RNA, 22 nt, Homo sapiens
  source 1..22: mol_type = other RNA
atataatacaacctgctaagtg

SEQ ID NO: 402 - RNA, 22 nt, Homo sapiens
  source 1..22: mol_type = other RNA
ataatacaacctgctaagtgct

SEQ ID NO: 403 - RNA, 22 nt, Homo sapiens
  source 1..22: mol_type = other RNA
tttgttcgttcggctcgcgtga

SEQ ID NO: 404 - RNA, 21 nt, Homo sapiens
  source 1..21: mol_type = other RNA
ggtagattttccttctatggt

SEQ ID NO: 405 - RNA, 21 nt, Homo sapiens
  source 1..21: mol_type = other RNA
atcatagaggaaaatccacgt

SEQ ID NO: 406 - RNA, 22 nt, Homo sapiens
  source 1..22: mol_type = other RNA
atcatagaggaaaatccatgtt

SEQ ID NO: 407 - RNA, 21 nt, Homo sapiens
  source 1..21: mol_type = other RNA
aacatagaggaaattccacgt

SEQ ID NO: 408 - RNA, 21 nt, Homo sapiens
  source 1..21: mol_type = other RNA
ggtggatattccttctatgtt

SEQ ID NO: 409 - RNA, 22 nt, Homo sapiens
  source 1..22: mol_type = other RNA
atcacacaaaggcaacttttgt

SEQ ID NO: 410 - RNA, 19 nt, Homo sapiens
  source 1..19: mol_type = other RNA
actggacttggaggcagaa

SEQ ID NO: 411 - RNA, 25 nt, Homo sapiens
  source 1..25: mol_type = other RNA
actggacttggagtcagaagagtgg

SEQ ID NO: 412 - RNA, 20 nt, Homo sapiens
  source 1..20: mol_type = other RNA
actggacttggagtcagaaa

SEQ ID NO: 413 - RNA, 19 nt, Homo sapiens
  source 1..19: mol_type = other RNA
actggacttggagtcagga

SEQ ID NO: 414 - RNA, 20 nt, Homo sapiens
  source 1..20: mol_type = other RNA
actggacttggagccagaag

SEQ ID NO: 415 - RNA, 20 nt, Homo sapiens
  source 1..20: mol_type = other RNA
actgggcttggagtcagaag

SEQ ID NO: 416 - RNA, 21 nt, Homo sapiens
  source 1..21: mol_type = other RNA
actggacttggtgtcagatgg

SEQ ID NO: 417 - RNA, 21 nt, Homo sapiens
  source 1..21: mol_type = other RNA
actggactaggagtcagaagg

SEQ ID NO: 418 - RNA, 21 nt, Homo sapiens
  source 1..21: mol_type = other RNA
tggtagactatggaacgtagg

SEQ ID NO: 419 - RNA, 22 nt, Homo sapiens
  source 1..22: mol_type = other RNA
tatgtaatatggtccacatctt

SEQ ID NO: 420 - RNA, 22 nt, Homo sapiens
  source 1..22: mol_type = other RNA
tatacaagggcaagctctctgt

SEQ ID NO: 421 - RNA, 22 nt, Homo sapiens
  source 1..22: mol_type = other RNA
agcgaggttgccctttgtatat

SEQ ID NO: 422 - RNA, 21 nt, Homo sapiens
  source 1..21: mol_type = other RNA
aatcattcacggacaacactt

SEQ ID NO: 423 - RNA, 22 nt, Homo sapiens
  source 1..22: mol_type = other RNA
gaagttgttcgtggtggattcg

SEQ ID NO: 424 - RNA, 22 nt, Homo sapiens
  source 1..22: mol_type = other RNA
agatcagaaggtgattgtggct

SEQ ID NO: 425 - RNA, 20 nt, Homo sapiens
  source 1..20: mol_type = other RNA
attcctagaaattgttcata

SEQ ID NO: 426 - RNA, 26 nt, Homo sapiens
  source 1..26: mol_type = other RNA
aagaggaagaaatggctggttctcag

SEQ ID NO: 427 - RNA, 21 nt, Homo sapiens
  source 1..21: mol_type = other RNA
acagggccgcagatggagact

SEQ ID NO: 428 - RNA, 22 nt, Homo sapiens
  source 1..22: mol_type = other RNA
ggaggaaccttggagcttcggc

SEQ ID NO: 429 - RNA, 22 nt, Homo sapiens
  source 1..22: mol_type = other RNA
tcaggtgtggaaactgaggcag

SEQ ID NO: 430 - RNA, 22 nt, Homo sapiens
  source 1..22: mol_type = other RNA
gaatgttgctcggtgaacccct

SEQ ID NO: 431 - RNA, 23 nt, Homo sapiens
  source 1..23: mol_type = other RNA
aggttacccgagcaactttgcat

SEQ ID NO: 432 - RNA, 21 nt, Homo sapiens
  source 1..21: mol_type = other RNA
aatataacacagatggcctgt

SEQ ID NO: 433 - RNA, 21 nt, Homo sapiens
  source 1..21: mol_type = other RNA
tagtagaccgtatagcgtacg

SEQ ID NO: 434 - RNA, 23 nt, Homo sapiens
  source 1..23: mol_type = other RNA
acttcacctggtccactagccgt

SEQ ID NO: 435 - RNA, 23 nt, Homo sapiens
  source 1..23: mol_type = other RNA
atcaacagacattaattgggcgc

SEQ ID NO: 436 - RNA, 22 nt, Homo sapiens
  source 1..22: mol_type = other RNA
actggacttagggtcagaaggc

SEQ ID NO: 437 - RNA, 23 nt, Homo sapiens
  source 1..23: mol_type = other RNA
agctcggtctgaggcccctcagt

SEQ ID NO: 438 - RNA, 23 nt, Homo sapiens
  source 1..23: mol_type = other RNA
tgaggggcagagagcgagacttt

SEQ ID NO: 439 - RNA, 22 nt, Homo sapiens
  source 1..22: mol_type = other RNA
cagcagcaattcatgttttgaa

SEQ ID NO: 440 - RNA, 23 nt, Homo sapiens
  source 1..23: mol_type = other RNA
aatgacacgatcactcccgttga

SEQ ID NO: 441 - RNA, 18 nt, Homo sapiens
  source 1..18: mol_type = other RNA
gggctcacatcaccccat

SEQ ID NO: 442 - RNA, 17 nt, Homo sapiens
  source 1..17: mol_type = other RNA
accccactcctggtacc

SEQ ID NO: 443 - RNA, 22 nt, Homo sapiens
  source 1..22: mol_type = other RNA
taatactgtctggtaaaaccgt

SEQ ID NO: 444 - RNA, 21 nt, Homo sapiens
  source 1..21: mol_type = other RNA
tgtcttgcaggccgtcatgca

SEQ ID NO: 445 - RNA, 23 nt, Homo sapiens
  source 1..23: mol_type = other RNA
tcttggagtaggtcattgggtgg

SEQ ID NO: 446 - RNA, 22 nt, Homo sapiens
  source 1..22: mol_type = other RNA
atcatgatgggctcctcggtgt

SEQ ID NO: 447 - RNA, 22 nt, Homo sapiens
  source 1..22: mol_type = other RNA
tacggtgagcctgtcattattc

SEQ ID NO: 448 - RNA, 22 nt, Homo sapiens
  source 1..22: mol_type = other RNA
acctgtctgtggaaaggagcta

SEQ ID NO: 449 - RNA, 22 nt, Homo sapiens
  source 1..22: mol_type = other RNA
tgttgggattcagcaggaccat

SEQ ID NO: 450 - RNA, 22 nt, Homo sapiens
  source 1..22: mol_type = other RNA
gcgactctgaaaactagaaggt

SEQ ID NO: 451 - RNA, 22 nt, Homo sapiens
  source 1..22: mol_type = other RNA
atggccagagctcacacagagg

SEQ ID NO: 452 - RNA, 17 nt, Homo sapiens
  source 1..17: mol_type = other RNA
ttggaggcgtgggtttt

SEQ ID NO: 453 - RNA, 20 nt, Homo sapiens
  source 1..20: mol_type = other RNA
ggctccttggtctaggggta

SEQ ID NO: 454 - RNA, 17 nt, Homo sapiens
  source 1..17: mol_type = other RNA
tggtagagctgaggaca

SEQ ID NO: 455 - RNA, 20 nt, Homo sapiens
  source 1..20: mol_type = other RNA
ggatccgagtcacggcacca

SEQ ID NO: 456 - RNA, 17 nt, Homo sapiens
  source 1..17: mol_type = other RNA
agggtgtgtgtgttttt

SEQ ID NO: 457 - RNA, 19 nt, Homo sapiens
  source 1..19: mol_type = other RNA
agaggtaggtgtggaagaa

SEQ ID NO: 458 - RNA, 23 nt, Homo sapiens
  source 1..23: mol_type = other RNA
gattgagactagtagggctaggc

SEQ ID NO: 459 - RNA, 22 nt, Homo sapiens
  source 1..22: mol_type = other RNA
ttgcatatgtaggatgtcccat

SEQ ID NO: 460 - RNA, 20 nt, Homo sapiens
  source 1..20: mol_type = other RNA
taacggccgcggtaccctaa

SEQ ID NO: 461 - RNA, 18 nt, Homo sapiens
  source 1..18: mol_type = other RNA
agggggcgggctccggcg

SEQ ID NO: 462 - RNA, 22 nt, Homo sapiens
  source 1..22: mol_type = other RNA
tggcagtgtattgttagctggt

SEQ ID NO: 463 - RNA, 22 nt, Homo sapiens
  source 1..22: mol_type = other RNA
aggcagtgtattgttagctggc

SEQ ID NO: 464 - RNA, 25 nt, Homo sapiens
  source 1..25: mol_type = other RNA
taggcagtgtattgctagcggctgt

SEQ ID NO: 465 - RNA, 22 nt, Homo sapiens
  source 1..22: mol_type = other RNA
attgggaacattttgcatgtat

SEQ ID NO: 466 - RNA, 22 nt, Homo sapiens
  source 1..22: mol_type = other RNA
attggggacattttgcattcat

SEQ ID NO: 467 - RNA, 22 nt, Homo sapiens
  source 1..22: mol_type = other RNA
ttttgcgatgtgttcctaatat

SEQ ID NO: 468 - RNA, 22 nt, Homo sapiens
  source 1..22: mol_type = other RNA
ttgggatcattttgcatccata

SEQ ID NO: 469 - RNA, 22 nt, Homo sapiens
  source 1..22: mol_type = other RNA
ttttgcaatatgttcctgaata

SEQ ID NO: 470 - RNA, 17 nt, Homo sapiens
  source 1..17: mol_type = other RNA
gggagaagggtcggggc

SEQ ID NO: 471 - RNA, 22 nt, Homo sapiens
  source 1..22: mol_type = other RNA
gctaaggaagtcctgtgctcag

SEQ ID NO: 472 - RNA, 22 nt, Homo sapiens
  source 1..22: mol_type = other RNA
atagcagcatgaacctgtctca

SEQ ID NO: 473 - RNA, 22 nt, Homo sapiens
  source 1..22: mol_type = other RNA
aactgtttgcagaggaaactga

SEQ ID NO: 474 - RNA, 17 nt, Homo sapiens
  source 1..17: mol_type = other RNA
atggagaaggcttctga

SEQ ID NO: 475 - RNA, 17 nt, Homo sapiens
  source 1..17: mol_type = other RNA
ccccggggagcccggcg

SEQ ID NO: 476 - RNA, 21 nt, Homo sapiens
  source 1..21: mol_type = other RNA
tcgtgcatatatctaccacat

SEQ ID NO: 477 - RNA, 21 nt, Homo sapiens
  source 1..21: mol_type = other RNA
tgtggtagatatatgcacgat

SEQ ID NO: 478 - RNA, 23 nt, Homo sapiens
  source 1..23: mol_type = other RNA
tagtgcaatattgcttatagggt

SEQ ID NO: 479 - RNA, 21 nt, Homo sapiens
  source 1..21: mol_type = other RNA
gcagtccatgggcatatacac

SEQ ID NO: 480 - RNA, 22 nt, Homo sapiens
  source 1..22: mol_type = other RNA
tatgtgcctttggactacatcg

SEQ ID NO: 481 - RNA, 23 nt, Homo sapiens
  source 1..23: mol_type = other RNA
gaagatggtgctgtgctgaggaa

SEQ ID NO: 482 - RNA, 22 nt, Homo sapiens
  source 1..22: mol_type = other RNA
agcccgccccagccgaggttct

SEQ ID NO: 483 - RNA, 23 nt, Homo sapiens
  source 1..23: mol_type = other RNA
gccccggcgcgggcgggttctgg

SEQ ID NO: 484 - RNA, 23 nt, Homo sapiens
  source 1..23: mol_type = other RNA
cgggctgtccggaggggtcggct

SEQ ID NO: 485 - RNA, 22 nt, Homo sapiens
  source 1..22: mol_type = other RNA
tttcccttcagagcctggcttt

SEQ ID NO: 486 - RNA, 24 nt, Homo sapiens
  source 1..24: mol_type = other RNA
gatgcgccgcccactgccccgcgc

SEQ ID NO: 487 - RNA, 22 nt, Homo sapiens
  source 1..22: mol_type = other RNA
gcgggggtggcggcggcatccc

SEQ ID NO: 488 - RNA, 18 nt, Homo sapiens
  source 1..18: mol_type = other RNA
cggtgagcgctcgctggc

SEQ ID NO: 489 - RNA, 21 nt, Homo sapiens
  source 1..21: mol_type = other RNA
tcactcctctcctcccgtctt

SEQ ID NO: 490 - RNA, 22 nt, Homo sapiens
  source 1..22: mol_type = other RNA
aagacgggaggaaagaagggag

SEQ ID NO: 491 - RNA, 22 nt, Homo sapiens
  source 1..22: mol_type = other RNA
tcaggctcagtcccctcccgat

SEQ ID NO: 492 - RNA, 22 nt, Homo sapiens
  source 1..22: mol_type = other RNA
gtcatacacggctctcctctct

SEQ ID NO: 493 - RNA, 22 nt, Homo sapiens
  source 1..22: mol_type = other RNA
agaggctggccgtgatgaattc

SEQ ID NO: 494 - RNA, 21 nt, Homo sapiens
  source 1..21: mol_type = other RNA
cggggcagctcagtacaggat

SEQ ID NO: 495 - RNA, 22 nt, Homo sapiens
  source 1..22: mol_type = other RNA
aatcatacagggacatccagtt

SEQ ID NO: 496 - RNA, 22 nt, Homo sapiens
  source 1..22: mol_type = other RNA
aatcgtacagggtcatccactt

SEQ ID NO: 497 - RNA, 22 nt, Homo sapiens
  source 1..22: mol_type = other RNA
gtggttatccctgtcctgttcg

SEQ ID NO: 498 - RNA, 21 nt, Homo sapiens
  source 1..21: mol_type = other RNA
ttgaaaggctatttcttggtc

SEQ ID NO: 499 - RNA, 22 nt, Homo sapiens
  source 1..22: mol_type = other RNA
gtgacatcacatatacggcagc

SEQ ID NO: 500 - RNA, 22 nt, Homo sapiens
  source 1..22: mol_type = other RNA
caacctggaggactccatgctg

SEQ ID NO: 501 - RNA, 20 nt, Homo sapiens
  source 1..20: mol_type = other RNA
ccatggatctccaggtgggt

SEQ ID NO: 502 - RNA, 22 nt, Homo sapiens
  source 1..22: mol_type = other RNA
cttatgcaagattcccttctac

SEQ ID NO: 503 - RNA, 22 nt, Homo sapiens
  source 1..22: mol_type = other RNA
agtggggaacccttccatgagg

SEQ ID NO: 504 - RNA, 23 nt, Homo sapiens
  source 1..23: mol_type = other RNA
aggacctgcgggacaagattctt

SEQ ID NO: 505 - RNA, 22 nt, Homo sapiens
  source 1..22: mol_type = other RNA
tgaaggtctactgtgtgccagg

SEQ ID NO: 506 - RNA, 22 nt, Homo sapiens
  source 1..22: mol_type = other RNA
tgaaacatacacgggaaacctc

SEQ ID NO: 507 - RNA, 23 nt, Homo sapiens
  source 1..23: mol_type = other RNA
aggttgtccgtgttgtcttctct

SEQ ID NO: 508 - RNA, 22 nt, Homo sapiens
  source 1..22: mol_type = other RNA
aaacaaacatggtgcacttctt

SEQ ID NO: 509 - RNA, 22 nt, Homo sapiens
  source 1..22: mol_type = other RNA
gaagttgcccatgttattttcg

SEQ ID NO: 510 - RNA, 22 nt, Homo sapiens
  source 1..22: mol_type = other RNA
tgagtattacatggccaatctc

SEQ ID NO: 511 - RNA, 21 nt, Homo sapiens
  source 1..21: mol_type = other RNA
cagcagcacactgtggtttgt

SEQ ID NO: 512 - RNA, 23 nt, Homo sapiens
  source 1..23: mol_type = other RNA
tttcaagccagggggcgtttttc

SEQ ID NO: 513 - RNA, 22 nt, Homo sapiens
  source 1..22: mol_type = other RNA
aacatcacagcaagtctgtgct

SEQ ID NO: 514 - RNA, 21 nt, Homo sapiens
  source 1..21: mol_type = other RNA
ttaagacttgcagtgatgttt

SEQ ID NO: 515 - RNA, 22 nt, Homo sapiens
  source 1..22: mol_type = other RNA
aacatcactgcaagtcttaaca

SEQ ID NO: 516 - RNA, 21 nt, Homo sapiens
  source 1..21: mol_type = other RNA
acagacttgctgtgatgttca

SEQ ID NO: 517 - RNA, 22 nt, Homo sapiens
  source 1..22: mol_type = other RNA
ttctgcctctgtccaggtcctt

SEQ ID NO: 518 - RNA, 24 nt, Homo sapiens
  source 1..24: mol_type = other RNA
agggctggactcagcggcggagct

SEQ ID NO: 519 - RNA, 23 nt, Homo sapiens
  source 1..23: mol_type = other RNA
taatccttgctacctgggtgaga

SEQ ID NO: 520 - RNA, 22 nt, Homo sapiens
  source 1..22: mol_type = other RNA
ttttgtgtctcccattccccag

SEQ ID NO: 521 - RNA, 22 nt, Homo sapiens
  source 1..22: mol_type = other RNA
agggggatggcagagcaaaatt

SEQ ID NO: 522 - RNA, 22 nt, Homo sapiens
  source 1..22: mol_type = other RNA
aatgcacccgggcaaggattct

SEQ ID NO: 523 - RNA, 22 nt, Homo sapiens
  source 1..22: mol_type = other RNA
aatgcacctgggcaaggattca

SEQ ID NO: 524 - RNA, 21 nt, Homo sapiens
  source 1..21: mol_type = other RNA
atccttgctatctgggtgcta

SEQ ID NO: 525 - RNA, 23 nt, Homo sapiens
  source 1..23: mol_type = other RNA
ggggtattgtttccgctgccagg

SEQ ID NO: 526 - RNA, 23 nt, Homo sapiens
  source 1..23: mol_type = other RNA
tagcagcgggaacagttctgcag

SEQ ID NO: 527 - RNA, 21 nt, Homo sapiens
  source 1..21: mol_type = other RNA
gggagtgcagggcagggtttc

SEQ ID NO: 528 - RNA, 22 nt, Homo sapiens
  source 1..22: mol_type = other RNA
agaccctggtctgcactctatc

SEQ ID NO: 529 - RNA, 22 nt, Homo sapiens
  source 1..22: mol_type = other RNA
cgtcaacacttgctggtttcct

SEQ ID NO: 530 - RNA, 21 nt, Homo sapiens
  source 1..21: mol_type = other RNA
taaggcacccttctgagtaga

SEQ ID NO: 531 - RNA, 22 nt, Homo sapiens
  source 1..22: mol_type = other RNA
tattcaggaaggtgttacttaa

SEQ ID NO: 532 - RNA, 21 nt, Homo sapiens
  source 1..21: mol_type = other RNA
ttttgcaccttttggagtgaa

SEQ ID NO: 533 - RNA, 23 nt, Homo sapiens
  source 1..23: mol_type = other RNA
tgattgtagccttttggagtaga

SEQ ID NO: 534 - RNA, 23 nt, Homo sapiens
  source 1..23: mol_type = other RNA
tactccagagggcgtcactcatg

SEQ ID NO: 535 - RNA, 22 nt, Homo sapiens
  source 1..22: mol_type = other RNA
tactgcagacgtggcaatcatg

SEQ ID NO: 536 - RNA, 22 nt, Homo sapiens
  source 1..22: mol_type = other RNA
tgattggtacgtctgtgggtag

SEQ ID NO: 537 - RNA, 21 nt, Homo sapiens
  source 1..21: mol_type = other RNA
tactgcagacagtggcaatca

SEQ ID NO: 538 - RNA, 21 nt, Homo sapiens
  source 1..21: mol_type = other RNA
attgaaacctctaagagtgga

SEQ ID NO: 539 - RNA, 22 nt, Homo sapiens
  source 1..22: mol_type = other RNA
tactcaggagagtggcaatcac

SEQ ID NO: 540 - RNA, 21 nt, Homo sapiens
  source 1..21: mol_type = other RNA
gtgtcttttgctctgcagtca

SEQ ID NO: 541 - RNA, 22 nt, Homo sapiens
  source 1..22: mol_type = other RNA
aagtgctgtcatagctgaggtc

SEQ ID NO: 542 - RNA, 23 nt, Homo sapiens
  source 1..23: mol_type = other RNA
cactcagccttgagggcactttc

SEQ ID NO: 543 - RNA, 23 nt, Homo sapiens
  source 1..23: mol_type = other RNA
taaatttcacctttctgagaagg

SEQ ID NO: 544 - RNA, 18 nt, Homo sapiens
  source 1..18: mol_type = other RNA
ttcacagggaggtgtcat

SEQ ID NO: 545 - RNA, 22 nt, Homo sapiens
  source 1..22: mol_type = other RNA
ttcacaaggaggtgtcatttat

SEQ ID NO: 546 - RNA, 23 nt, Homo sapiens
  source 1..23: mol_type = other RNA
taaatttcacctttctgagaaga

SEQ ID NO: 547 - RNA, 22 nt, Homo sapiens
  source 1..22: mol_type = other RNA
ttctcaaggaggtgtcgtttat

SEQ ID NO: 548 - RNA, 21 nt, Homo sapiens
  source 1..21: mol_type = other RNA
attgacacttctgtgagtaga

SEQ ID NO: 549 - RNA, 23 nt, Homo sapiens
  source 1..23: mol_type = other RNA
tactctggagagtgacaatcatg

SEQ ID NO: 550 - RNA, 21 nt, Homo sapiens
  source 1..21: mol_type = other RNA
attgacacctctgtgagtgga

SEQ ID NO: 551 - RNA, 22 nt, Homo sapiens
  source 1..22: mol_type = other RNA
ttctcaagagggaggcaatcat

SEQ ID NO: 552 - RNA, 22 nt, Homo sapiens
  source 1..22: mol_type = other RNA
gagtgccttcttttggagcgtt

SEQ ID NO: 553 - RNA, 24 nt, Homo sapiens
  source 1..24: mol_type = other RNA
ttctccaaaagaaagcactttctg

SEQ ID NO: 554 - RNA, 18 nt, Homo sapiens
  source 1..18: mol_type = other RNA
tgcttcctttcagagggt

SEQ ID NO: 555 - RNA, 23 nt, Homo sapiens
  source 1..23: mol_type = other RNA
ttctcgaggaaagaagcactttc

SEQ ID NO: 556 - RNA, 22 nt, Homo sapiens
  source 1..22: mol_type = other RNA
atctggaggtaagaagcacttt

SEQ ID NO: 557 - RNA, 22 nt, Homo sapiens
  source 1..22: mol_type = other RNA
atcgtgcatccctttagagtgt

SEQ ID NO: 558 - RNA, 22 nt, Homo sapiens
  source 1..22: mol_type = other RNA
atcgtgcatccctttagagtgt

SEQ ID NO: 559 - RNA, 22 nt, Homo sapiens
  source 1..22: mol_type = other RNA
atcgtgcatccttttagagtgt

SEQ ID NO: 560 - RNA, 22 nt, Homo sapiens
  source 1..22: mol_type = other RNA
caaagcgctcccctttagaggt

SEQ ID NO: 561 - RNA, 23 nt, Homo sapiens
  source 1..23: mol_type = other RNA
caaagcgcttctctttagagtgt

SEQ ID NO: 562 - RNA, 21 nt, Homo sapiens
  source 1..21: mol_type = other RNA
caaagcgcttccctttggagc

SEQ ID NO: 563 - RNA, 21 nt, Homo sapiens
  source 1..21: mol_type = other RNA
aaagcgcttcccttcagagtg

SEQ ID NO: 564 - RNA, 21 nt, Homo sapiens
  source 1..21: mol_type = other RNA
gaaagcgcttctctttagagg

SEQ ID NO: 565 - RNA, 21 nt, Homo sapiens
  source 1..21: mol_type = other RNA
tcatcctcgtctccctcccag

SEQ ID NO: 566 - RNA, 22 nt, Homo sapiens
  source 1..22: mol_type = other RNA
agggaaggggacgagggttggg

SEQ ID NO: 567 - RNA, 22 nt, Homo sapiens
  source 1..22: mol_type = other RNA
aaagtgcatccttttagaggtt

SEQ ID NO: 568 - RNA, 22 nt, Homo sapiens
  source 1..22: mol_type = other RNA
ctctagagggaagcgctttctg

SEQ ID NO: 569 - RNA, 22 nt, Homo sapiens
  source 1..22: mol_type = other RNA
aaagtgcatctttttagaggat

SEQ ID NO: 570 - RNA, 22 nt, Homo sapiens
  source 1..22: mol_type = other RNA
caaagtgcctccctttagagtg

SEQ ID NO: 571 - RNA, 22 nt, Homo sapiens
  source 1..22: mol_type = other RNA
aagtgcctccttttagagtgtt

SEQ ID NO: 572 - RNA, 22 nt, Homo sapiens
  source 1..22: mol_type = other RNA
aaagtgcttccctttggactgt

SEQ ID NO: 573 - RNA, 21 nt, Homo sapiens
  source 1..21: mol_type = other RNA
ctccagagggaagtactttct

SEQ ID NO: 574 - RNA, 21 nt, Homo sapiens
  source 1..21: mol_type = other RNA
aaagtgcttccttttagaggg

SEQ ID NO: 575 - RNA, 22 nt, Homo sapiens
  source 1..22: mol_type = other RNA
aaagtgcttccttttagagggt

SEQ ID NO: 576 - RNA, 22 nt, Homo sapiens
  source 1..22: mol_type = other RNA
aaagtgcttctctttggtgggt

SEQ ID NO: 577 - RNA, 20 nt, Homo sapiens
  source 1..20: mol_type = other RNA
ctacaaagggaagccctttc

SEQ ID NO: 578 - RNA, 21 nt, Homo sapiens
  source 1..21: mol_type = other RNA
aaagtgcttcctttttgaggg

SEQ ID NO: 579 - RNA, 22 nt, Homo sapiens
  source 1..22: mol_type = other RNA
aagtgcttccttttagagggtt

SEQ ID NO: 580 - RNA, 24 nt, Homo sapiens
  source 1..24: mol_type = other RNA
acaaagtgcttccctttagagtgt

SEQ ID NO: 581 - RNA, 22 nt, Homo sapiens
  source 1..22: mol_type = other RNA
acaaagtgcttccctttagagt

SEQ ID NO: 582 - RNA, 22 nt, Homo sapiens
  source 1..22: mol_type = other RNA
aacgcacttccctttagagtgt

SEQ ID NO: 583 - RNA, 22 nt, Homo sapiens
  source 1..22: mol_type = other RNA
aaaatggttccctttagagtgt

SEQ ID NO: 584 - RNA, 23 nt, Homo sapiens
  source 1..23: mol_type = other RNA
gaacgcgcttccctatagagggt

SEQ ID NO: 585 - RNA, 21 nt, Homo sapiens
  source 1..21: mol_type = other RNA
gaaggcgcttccctttggagt

SEQ ID NO: 586 - RNA, 22 nt, Homo sapiens
  source 1..22: mol_type = other RNA
gaaggcgcttccctttagagcg

SEQ ID NO: 587 - RNA, 21 nt, Homo sapiens
  source 1..21: mol_type = other RNA
ctccagagggatgcactttct

SEQ ID NO: 588 - RNA, 22 nt, Homo sapiens
  source 1..22: mol_type = other RNA
ctctagagggaagcactttctg

SEQ ID NO: 589 - RNA, 23 nt, Homo sapiens
  source 1..23: mol_type = other RNA
ctcttgagggaagcactttctgt

SEQ ID NO: 590 - RNA, 22 nt, Homo sapiens
  source 1..22: mol_type = other RNA
cctcccacacccaaggcttgca

SEQ ID NO: 591 - RNA, 22 nt, Homo sapiens
  source 1..22: mol_type = other RNA
catgccttgagtgtaggaccgt

SEQ ID NO: 592 - RNA, 22 nt, Homo sapiens
  source 1..22: mol_type = other RNA
atcatacaaggacaatttcttt

SEQ ID NO: 593 - RNA, 22 nt, Homo sapiens
  source 1..22: mol_type = other RNA
ggagaaattatccttggtgtgt

SEQ ID NO: 594 - RNA, 22 nt, Homo sapiens
  source 1..22: mol_type = other RNA
tggtgggcacagaatctggact

SEQ ID NO: 595 - RNA, 22 nt, Homo sapiens
  source 1..22: mol_type = other RNA
tgtgacagattgataactgaaa

SEQ ID NO: 596 - RNA, 23 nt, Homo sapiens
  source 1..23: mol_type = other RNA
tcggggatcatcatgtcacgaga

SEQ ID NO: 597 - RNA, 22 nt, Homo sapiens
  source 1..22: mol_type = other RNA
aaacattcgcggtgcacttctt

SEQ ID NO: 598 - RNA, 22 nt, Homo sapiens
  source 1..22: mol_type = other RNA
attctgcatttttagcaagttc

SEQ ID NO: 599 - RNA, 22 nt, Homo sapiens
  source 1..22: mol_type = other RNA
tcagcaaacatttattgtgtgc

SEQ ID NO: 600 - RNA, 22 nt, Homo sapiens
  source 1..22: mol_type = other RNA
caaaactggcaattacttttgc

SEQ ID NO: 601 - RNA, 22 nt, Homo sapiens
  source 1..22: mol_type = other RNA
aaaagtaattgcgagttttacc

SEQ ID NO: 602 - RNA, 25 nt, Homo sapiens
  source 1..25: mol_type = other RNA
aaaaaccacaattacttttgcacca

SEQ ID NO: 603 - RNA, 22 nt, Homo sapiens
  source 1..22: mol_type = other RNA
gaaaacgacaatgacttttgca

SEQ ID NO: 604 - RNA, 20 nt, Homo sapiens
  source 1..20: mol_type = other RNA
aaaagtgattgcagtgtttg

SEQ ID NO: 605 - RNA, 22 nt, Homo sapiens
  source 1..22: mol_type = other RNA
aaaggtaattgcagtttttccc

SEQ ID NO: 606 - RNA, 21 nt, Homo sapiens
  source 1..21: mol_type = other RNA
aaaagtaactgcggtttttga

SEQ ID NO: 607 - RNA, 22 nt, Homo sapiens
  source 1..22: mol_type = other RNA
aacggcaatgacttttgtacca

SEQ ID NO: 608 - RNA, 21 nt, Homo sapiens
  source 1..21: mol_type = other RNA
taaaactgcagttatttttgc

SEQ ID NO: 609 - RNA, 21 nt, Homo sapiens
  source 1..21: mol_type = other RNA
aaaagtaattgcagtttttgc

SEQ ID NO: 610 - RNA, 22 nt, Homo sapiens
  source 1..22: mol_type = other RNA
caagaacctcagttgcttttgt

SEQ ID NO: 611 - RNA, 22 nt, Homo sapiens
  source 1..22: mol_type = other RNA
aaaagtaattgcggtttttgcc

SEQ ID NO: 612 - RNA, 22 nt, Homo sapiens
  source 1..22: mol_type = other RNA
caaaaaccacagtttcttttgc

SEQ ID NO: 613 - RNA, 22 nt, Homo sapiens
  source 1..22: mol_type = other RNA
aaaagtaattgtggtttttgcc

SEQ ID NO: 614 - RNA, 22 nt, Homo sapiens
  source 1..22: mol_type = other RNA
aaaaactgagactacttttgca

SEQ ID NO: 615 - RNA, 22 nt, Homo sapiens
  source 1..22: mol_type = other RNA
caaaagcaatcgcggtttttgc

SEQ ID NO: 616 - RNA, 22 nt, Homo sapiens
  source 1..22: mol_type = other RNA
aaaactgtaattacttttgtac

SEQ ID NO: 617 - RNA, 22 nt, Homo sapiens
  source 1..22: mol_type = other RNA
aaaagtaatcgcggtttttgtc

SEQ ID NO: 618 - RNA, 22 nt, Homo sapiens
  source 1..22: mol_type = other RNA
aaaagtaattgcggattttgcc

SEQ ID NO: 619 - RNA, 21 nt, Homo sapiens
  source 1..21: mol_type = other RNA
caaaaactgcattacttttgc

SEQ ID NO: 620 - RNA, 22 nt, Homo sapiens
  source 1..22: mol_type = other RNA
aaaagtaattgcggtctttggt

SEQ ID NO: 621 - RNA, 22 nt, Homo sapiens
  source 1..22: mol_type = other RNA
aaaagtacttgcggattttgct

SEQ ID NO: 622 - RNA, 22 nt, Homo sapiens
  source 1..22: mol_type = other RNA
aaaagtatttgcgggttttgtc

SEQ ID NO: 623 - RNA, 21 nt, Homo sapiens
  source 1..21: mol_type = other RNA
caaaggtatttgtggtttttg

SEQ ID NO: 624 - RNA, 22 nt, Homo sapiens
  source 1..22: mol_type = other RNA
caaaagtaattgtggattttgt

SEQ ID NO: 625 - RNA, 22 nt, Homo sapiens
  source 1..22: mol_type = other RNA
ccaaaactgcagttacttttgc

SEQ ID NO: 626 - RNA, 22 nt, Homo sapiens
  source 1..22: mol_type = other RNA
gctggtgcaaaagtaatggcgg

SEQ ID NO: 627 - RNA, 22 nt, Homo sapiens
  source 1..22: mol_type = other RNA
agctacagttacttttgcacca

SEQ ID NO: 628 - RNA, 22 nt, Homo sapiens
  source 1..22: mol_type = other RNA
aaaagtaatcactgtttttgcc

SEQ ID NO: 629 - RNA, 23 nt, Homo sapiens
  source 1..23: mol_type = other RNA
caaaaaccgcaattacttttgca

SEQ ID NO: 630 - RNA, 21 nt, Homo sapiens
  source 1..21: mol_type = other RNA
tgacaactatggatgagctct

SEQ ID NO: 631 - RNA, 23 nt, Homo sapiens
  source 1..23: mol_type = other RNA
agtgcctgagggagtaagagccc

SEQ ID NO: 632 - RNA, 21 nt, Homo sapiens
  source 1..21: mol_type = other RNA
gcgacccactcttggtttcca

SEQ ID NO: 633 - RNA, 21 nt, Homo sapiens
  source 1..21: mol_type = other RNA
gcgacccatacttggtttcag

SEQ ID NO: 634 - RNA, 21 nt, Homo sapiens
  source 1..21: mol_type = other RNA
aacaggtgactggttagacaa

SEQ ID NO: 635 - RNA, 21 nt, Homo sapiens
  source 1..21: mol_type = other RNA
aaaacggtgagattttgtttt

SEQ ID NO: 636 - RNA, 21 nt, Homo sapiens
  source 1..21: mol_type = other RNA
gctagtcctgactcagccagt

SEQ ID NO: 637 - RNA, 21 nt, Homo sapiens
  source 1..21: mol_type = other RNA
agggtaagctgaacctctgat

SEQ ID NO: 638 - RNA, 22 nt, Homo sapiens
  source 1..22: mol_type = other RNA
atattaccattagctcatcttt

SEQ ID NO: 639 - RNA, 22 nt, Homo sapiens
  source 1..22: mol_type = other RNA
gatgagctcattgtaatatgag

SEQ ID NO: 640 - RNA, 22 nt, Homo sapiens
  source 1..22: mol_type = other RNA
caaagtttaagatccttgaagt

SEQ ID NO: 641 - RNA, 22 nt, Homo sapiens
  source 1..22: mol_type = other RNA
atcaaggatcttaaactttgcc

SEQ ID NO: 642 - RNA, 20 nt, Homo sapiens
  source 1..20: mol_type = other RNA
aaagtagctgtaccatttgc

SEQ ID NO: 643 - RNA, 19 nt, Homo sapiens
  source 1..19: mol_type = other RNA
aggttgacatacgtttccc

SEQ ID NO: 644 - RNA, 19 nt, Homo sapiens
  source 1..19: mol_type = other RNA
aggcacggtgtcagcaggc

SEQ ID NO: 645 - RNA, 19 nt, Homo sapiens
  source 1..19: mol_type = other RNA
gggcgcctgtgatcccaac

SEQ ID NO: 646 - RNA, 23 nt, Homo sapiens
  source 1..23: mol_type = other RNA
agtatgttcttccaggacagaac

SEQ ID NO: 647 - RNA, 20 nt, Homo sapiens
  source 1..20: mol_type = other RNA
atgtataaatgtatacacac

SEQ ID NO: 648 - RNA, 22 nt, Homo sapiens
  source 1..22: mol_type = other RNA
cgaaaacagcaattacctttgc

SEQ ID NO: 649 - RNA, 21 nt, Homo sapiens
  source 1..21: mol_type = other RNA
tgagttggccatctgagtgag

SEQ ID NO: 650 - RNA, 20 nt, Homo sapiens
  source 1..20: mol_type = other RNA
gtccgctcggcggtggccca

SEQ ID NO: 651 - RNA, 24 nt, Homo sapiens
  source 1..24: mol_type = other RNA
ctgaagtgatgtgtaactgatcag

SEQ ID NO: 652 - RNA, 22 nt, Homo sapiens
  source 1..22: mol_type = other RNA
cacgctcatgcacacacccaca

SEQ ID NO: 653 - RNA, 23 nt, Homo sapiens
  source 1..23: mol_type = other RNA
tgagtgtgtgtgtgtgagtgtgt

SEQ ID NO: 654 - RNA, 19 nt, Homo sapiens
  source 1..19: mol_type = other RNA
gagccagttggacaggagc

SEQ ID NO: 655 - RNA, 22 nt, Homo sapiens
  source 1..22: mol_type = other RNA
aagatgtggaaaaattggaatc

SEQ ID NO: 656 - RNA, 22 nt, Homo sapiens
  source 1..22: mol_type = other RNA
attctaatttctccacgtcttt

SEQ ID NO: 657 - RNA, 21 nt, Homo sapiens
  source 1..21: mol_type = other RNA
tagataaaatattggtacctg

SEQ ID NO: 658 - RNA, 21 nt, Homo sapiens
  source 1..21: mol_type = other RNA
cttcttgtgctctaggattgt

SEQ ID NO: 659 - RNA, 23 nt, Homo sapiens
  source 1..23: mol_type = other RNA
ttcatttggtataaaccgcgatt

SEQ ID NO: 660 - RNA, 22 nt, Homo sapiens
  source 1..22: mol_type = other RNA
tcgcggtttgtgccagatgacg

SEQ ID NO: 661 - RNA, 22 nt, Homo sapiens
  source 1..22: mol_type = other RNA
ttgagaatgatgaatcattagg

SEQ ID NO: 662 - RNA, 22 nt, Homo sapiens
  source 1..22: mol_type = other RNA
taactggttgaacaactgaacc

SEQ ID NO: 663 - RNA, 23 nt, Homo sapiens
  source 1..23: mol_type = other RNA
ttacagttgttcaaccagttact

SEQ ID NO: 664 - RNA, 22 nt, Homo sapiens
  source 1..22: mol_type = other RNA
tcagttccaggccaaccaggct

SEQ ID NO: 665 - RNA, 22 nt, Homo sapiens
  source 1..22: mol_type = other RNA
ttatggtttgcctgggactgag

SEQ ID NO: 666 - RNA, 19 nt, Homo sapiens
  source 1..19: mol_type = other RNA
tgggcgtatctgtatgcta

SEQ ID NO: 667 - RNA, 21 nt, Homo sapiens
  source 1..21: mol_type = other RNA
tttccataggtgatgagtcac

SEQ ID NO: 668 - RNA, 22 nt, Homo sapiens
  source 1..22: mol_type = other RNA
tgagaaccacgtctgctctgag

SEQ ID NO: 669 - RNA, 21 nt, Homo sapiens
  source 1..21: mol_type = other RNA
taattttatgtataagctagt

SEQ ID NO: 670 - RNA, 22 nt, Homo sapiens
  source 1..22: mol_type = other RNA
gagcttattcataaaagtgcag

SEQ ID NO: 671 - RNA, 20 nt, Homo sapiens
  source 1..20: mol_type = other RNA
agaccatgggttctcattgt

SEQ ID NO: 672 - RNA, 22 nt, Homo sapiens
  source 1..22: mol_type = other RNA
ttgtgtcaatatgcgatgatgt

SEQ ID NO: 673 - RNA, 19 nt, Homo sapiens
  source 1..19: mol_type = other RNA
tgtctctgctggggtttct

SEQ ID NO: 674 - RNA, 21 nt, Homo sapiens
  source 1..21: mol_type = other RNA
gaagtgtgccgtggtgtgtct

SEQ ID NO: 675 - RNA, 21 nt, Homo sapiens
  source 1..21: mol_type = other RNA
aagcctgcccggctcctcggg

SEQ ID NO: 676 - RNA, 22 nt, Homo sapiens
  source 1..22: mol_type = other RNA
tgtgtcactcgatgaccactgt

SEQ ID NO: 677 - RNA, 22 nt, Homo sapiens
  source 1..22: mol_type = other RNA
tacgtcatcgttgtcatcgtca

SEQ ID NO: 678 - RNA, 20 nt, Homo sapiens
  source 1..20: mol_type = other RNA
gttgtgtcagtttatcaaac

SEQ ID NO: 679 - RNA, 23 nt, Homo sapiens
  source 1..23: mol_type = other RNA
acttacagacaagagccttgctc

SEQ ID NO: 680 - RNA, 22 nt, Homo sapiens
  source 1..22: mol_type = other RNA
tggtctaggattgttggaggag

SEQ ID NO: 681 - RNA, 22 nt, Homo sapiens
  source 1..22: mol_type = other RNA
cacacactgcaattacttttgc

SEQ ID NO: 682 - RNA, 19 nt, Homo sapiens
  source 1..19: mol_type = other RNA
aggctgcggaattcaggac

SEQ ID NO: 683 - RNA, 23 nt, Homo sapiens
  source 1..23: mol_type = other RNA
taaatcccatggtgccttctcct

SEQ ID NO: 684 - RNA, 21 nt, Homo sapiens
  source 1..21: mol_type = other RNA
aaactactgaaaatcaaagat

SEQ ID NO: 685 - RNA, 21 nt, Homo sapiens
  source 1..21: mol_type = other RNA
gttcaaatccagatctataac

SEQ ID NO: 686 - RNA, 25 nt, Homo sapiens
  source 1..25: mol_type = other RNA
aggggtggtgttgggacagctccgt

SEQ ID NO: 687 - RNA, 21 nt, Homo sapiens
  source 1..21: mol_type = other RNA
tgagctaaatgtgtgctggga

SEQ ID NO: 688 - RNA, 25 nt, Homo sapiens
  source 1..25: mol_type = other RNA
gctgggcagggcttctgagctcctt

SEQ ID NO: 689 - RNA, 20 nt, Homo sapiens
  source 1..20: mol_type = other RNA
aggaatgttccttctttgcc

SEQ ID NO: 690 - RNA, 23 nt, Homo sapiens
  source 1..23: mol_type = other RNA
gaacgcctgttcttgccaggtgg

SEQ ID NO: 691 - RNA, 22 nt, Homo sapiens
  source 1..22: mol_type = other RNA
tccgagcctgggtctccctctt

SEQ ID NO: 692 - RNA, 22 nt, Homo sapiens
  source 1..22: mol_type = other RNA
gggggtccccggtgctcggatc

SEQ ID NO: 693 - RNA, 22 nt, Homo sapiens
  source 1..22: mol_type = other RNA
agtcattggagggtttgagcag

SEQ ID NO: 694 - RNA, 22 nt, Homo sapiens
  source 1..22: mol_type = other RNA
agacttcccatttgaaggtggc

SEQ ID NO: 695 - RNA, 24 nt, Homo sapiens
  source 1..24: mol_type = other RNA
gacctggacatgtttgtgcccagt

SEQ ID NO: 696 - RNA, 20 nt, Homo sapiens
  source 1..20: mol_type = other RNA
atggagatagatatagaaat

SEQ ID NO: 697 - RNA, 21 nt, Homo sapiens
  source 1..21: mol_type = other RNA
cacaaggtattggtattacct

SEQ ID NO: 698 - RNA, 21 nt, Homo sapiens
  source 1..21: mol_type = other RNA
agggggaaagttctatagtcc

SEQ ID NO: 699 - RNA, 19 nt, Homo sapiens
  source 1..19: mol_type = other RNA
agctgtctgaaaatgtctt

SEQ ID NO: 700 - RNA, 20 nt, Homo sapiens
  source 1..20: mol_type = other RNA
tcttttctttgagactcact

SEQ ID NO: 701 - RNA, 22 nt, Homo sapiens
  source 1..22: mol_type = other RNA
gtgagtctctaagaaaagagga

SEQ ID NO: 702 - RNA, 21 nt, Homo sapiens
  source 1..21: mol_type = other RNA
tctagtaagagtggcagtcga

SEQ ID NO: 703 - RNA, 22 nt, Homo sapiens
  source 1..22: mol_type = other RNA
atgctgacatatttactagagg

SEQ ID NO: 704 - RNA, 21 nt, Homo sapiens
  source 1..21: mol_type = other RNA
tgggtttacgttgggagaact

SEQ ID NO: 705 - RNA, 22 nt, Homo sapiens
  source 1..22: mol_type = other RNA
agtattctgtaccagggaaggt

SEQ ID NO: 706 - RNA, 21 nt, Homo sapiens
  source 1..21: mol_type = other RNA
agacctggcccagacctcagc

SEQ ID NO: 707 - RNA, 24 nt, Homo sapiens
  source 1..24: mol_type = other RNA
actgggggctttcgggctctgcgt

SEQ ID NO: 708 - RNA, 25 nt, Homo sapiens
  source 1..25: mol_type = other RNA
agggatcgcgggcgggtggcggcct

SEQ ID NO: 709 - RNA, 23 nt, Homo sapiens
  source 1..23: mol_type = other RNA
atcgctgcggttgcgagcgctgt

SEQ ID NO: 710 - RNA, 21 nt, Homo sapiens
  source 1..21: mol_type = other RNA
atgatccaggaacctgcctct

SEQ ID NO: 711 - RNA, 24 nt, Homo sapiens
  source 1..24: mol_type = other RNA
aaagacataggatagagtcacctc

SEQ ID NO: 712 - RNA, 22 nt, Homo sapiens
  source 1..22: mol_type = other RNA
agacacatttggagagggaacc

SEQ ID NO: 713 - RNA, 22 nt, Homo sapiens
  source 1..22: mol_type = other RNA
gtccctctccaaatgtgtcttg

SEQ ID NO: 714 - RNA, 22 nt, Homo sapiens
  source 1..22: mol_type = other RNA
acttgtatgctagctcaggtag

SEQ ID NO: 715 - RNA, 19 nt, Homo sapiens
  source 1..19: mol_type = other RNA
agtgtggctttcttagagc

SEQ ID NO: 716 - RNA, 19 nt, Homo sapiens
  source 1..19: mol_type = other RNA
aagtgtgcagggcactggt

SEQ ID NO: 717 - RNA, 22 nt, Homo sapiens
  source 1..22: mol_type = other RNA
aaacctgtgttgttcaagagtc

SEQ ID NO: 718 - RNA, 21 nt, Homo sapiens
  source 1..21: mol_type = other RNA
aggaggcagcgctctcaggac

SEQ ID NO: 719 - RNA, 21 nt, Homo sapiens
  source 1..21: mol_type = other RNA
gggactaggatgcagacctcc

SEQ ID NO: 720 - RNA, 23 nt, Homo sapiens
  source 1..23: mol_type = other RNA
aggtctgcattcaaatccccaga

SEQ ID NO: 721 - RNA, 22 nt, Homo sapiens
  source 1..22: mol_type = other RNA
cctcaccatcccttctgcctgc

SEQ ID NO: 722 - RNA, 23 nt, Homo sapiens
  source 1..23: mol_type = other RNA
caggcagaagtggggctgacagg

SEQ ID NO: 723 - RNA, 22 nt, Homo sapiens
  source 1..22: mol_type = other RNA
aaaggaaagtgtatcctaaaag

SEQ ID NO: 724 - RNA, 22 nt, Homo sapiens
  source 1..22: mol_type = other RNA
tttaggataagcttgacttttg

SEQ ID NO: 725 - RNA, 21 nt, Homo sapiens
  source 1..21: mol_type = other RNA
aatggcgccactagggttgtg

SEQ ID NO: 726 - RNA, 25 nt, Homo sapiens
  source 1..25: mol_type = other RNA
caaccctaggagagggtgccattca

SEQ ID NO: 727 - RNA, 22 nt, Homo sapiens
  source 1..22: mol_type = other RNA
tatgtctgctgaccatcacctt

SEQ ID NO: 728 - RNA, 22 nt, Homo sapiens
  source 1..22: mol_type = other RNA
tggtgggccgcagaacatgtgc

SEQ ID NO: 729 - RNA, 22 nt, Homo sapiens
  source 1..22: mol_type = other RNA
ataatacatggttaacctcttt

SEQ ID NO: 730 - RNA, 21 nt, Homo sapiens
  source 1..21: mol_type = other RNA
aatattatacagtcaacctct

SEQ ID NO: 731 - RNA, 21 nt, Homo sapiens
  source 1..21: mol_type = other RNA
acctcctgtgtgcatggatta

SEQ ID NO: 732 - RNA, 22 nt, Homo sapiens
  source 1..22: mol_type = other RNA
tacccattgcatatcggagttg

SEQ ID NO: 733 - RNA, 24 nt, Homo sapiens
  source 1..24: mol_type = other RNA
tgcctgggtctctggcctgcgcgt

SEQ ID NO: 734 - RNA, 22 nt, Homo sapiens
  source 1..22: mol_type = other RNA
aggcggggcgccgcgggaccgc

SEQ ID NO: 735 - RNA, 23 nt, Homo sapiens
  source 1..23: mol_type = other RNA
tattcatttatccccagcctaca

SEQ ID NO: 736 - RNA, 22 nt, Homo sapiens
  source 1..22: mol_type = other RNA
ttcatttgcctcccagcctaca

SEQ ID NO: 737 - RNA, 24 nt, Homo sapiens
  source 1..24: mol_type = other RNA
tgggctaagggagatgattgggta

SEQ ID NO: 738 - RNA, 20 nt, Homo sapiens
  source 1..20: mol_type = other RNA
accaggaggctgaggcccct

SEQ ID NO: 739 - RNA, 21 nt, Homo sapiens
  source 1..21: mol_type = other RNA
tccggttctcagggctccacc

SEQ ID NO: 740 - RNA, 23 nt, Homo sapiens
  source 1..23: mol_type = other RNA
aggaagccctggaggggctggag

SEQ ID NO: 741 - RNA, 22 nt, Homo sapiens
  source 1..22: mol_type = other RNA
cgcgcctgcaggaactggtaga

SEQ ID NO: 742 - RNA, 23 nt, Homo sapiens
  source 1..23: mol_type = other RNA
tgggcaggggcttattgtaggag

SEQ ID NO: 743 - RNA, 23 nt, Homo sapiens
  source 1..23: mol_type = other RNA
ctgggcccgcggcgggcgtgggg

SEQ ID NO: 744 - RNA, 23 nt, Homo sapiens
  source 1..23: mol_type = other RNA
tggtgcggagagggcccacagtg

SEQ ID NO: 745 - RNA, 23 nt, Homo sapiens
  source 1..23: mol_type = other RNA
aaggagcttacaatctagctggg

SEQ ID NO: 746 - RNA, 22 nt, Homo sapiens
  source 1..22: mol_type = other RNA
tgcggggctagggctaacagca

SEQ ID NO: 747 - RNA, 22 nt, Homo sapiens
  source 1..22: mol_type = other RNA
tttgtgacctggtccactaacc

SEQ ID NO: 748 - RNA, 22 nt, Homo sapiens
  source 1..22: mol_type = other RNA
gatggttgaccagagagcacac

SEQ ID NO: 749 - RNA, 23 nt, Homo sapiens
  source 1..23: mol_type = other RNA
tggaagactagtgattttgttgt

SEQ ID NO: 750 - RNA, 20 nt, Homo sapiens
  source 1..20: mol_type = other RNA
cggctctgggtctgtgggga

SEQ ID NO: 751 - RNA, 22 nt, Homo sapiens
  source 1..22: mol_type = other RNA
gcagcagggtgaaactgacaca

SEQ ID NO: 752 - RNA, 22 nt, Homo sapiens
  source 1..22: mol_type = other RNA
gcaggtgctcacttgtcctcct

SEQ ID NO: 753 - RNA, 21 nt, Homo sapiens
  source 1..21: mol_type = other RNA
tggaggagaaggaaggtgatg

SEQ ID NO: 754 - RNA, 22 nt, Homo sapiens
  source 1..22: mol_type = other RNA
actccagccccacagcctcagc

SEQ ID NO: 755 - RNA, 22 nt, Homo sapiens
  source 1..22: mol_type = other RNA
aggaggaattggtgctggtctt

SEQ ID NO: 756 - RNA, 23 nt, Homo sapiens
  source 1..23: mol_type = other RNA
tctgctcataccccatggtttct

SEQ ID NO: 757 - RNA, 23 nt, Homo sapiens
  source 1..23: mol_type = other RNA
tgcaccatggttgtctgagcatg

SEQ ID NO: 758 - RNA, 23 nt, Homo sapiens
  source 1..23: mol_type = other RNA
ctgggatctccggggtcttggtt

SEQ ID NO: 759 - RNA, 22 nt, Homo sapiens
  source 1..22: mol_type = other RNA
tgagacctctgggttctgagct

SEQ ID NO: 760 - RNA, 23 nt, Homo sapiens
  source 1..23: mol_type = other RNA
tccagtaccacgtgtcagggcca

SEQ ID NO: 761 - RNA, 23 nt, Homo sapiens
  source 1..23: mol_type = other RNA
cagtaacaaagattcatccttgt

SEQ ID NO: 762 - RNA, 22 nt, Homo sapiens
  source 1..22: mol_type = other RNA
ggagactgatgagttcccggga

SEQ ID NO: 763 - RNA, 21 nt, Homo sapiens
  source 1..21: mol_type = other RNA
gcaggaacttgtgagtctcct

SEQ ID NO: 764 - RNA, 22 nt, Homo sapiens
  source 1..22: mol_type = other RNA
ctgccctggcccgagggaccga

SEQ ID NO: 765 - RNA, 23 nt, Homo sapiens
  source 1..23: mol_type = other RNA
cggccccacgcaccagggtaaga

SEQ ID NO: 766 - RNA, 21 nt, Homo sapiens
  source 1..21: mol_type = other RNA
cctggaaacactgaggttgtg

SEQ ID NO: 767 - RNA, 22 nt, Homo sapiens
  source 1..22: mol_type = other RNA
tggtggtttacaaagtaattca

SEQ ID NO: 768 - RNA, 22 nt, Homo sapiens
  source 1..22: mol_type = other RNA
tggatttctttgtgaatcacca

SEQ ID NO: 769 - RNA, 20 nt, Homo sapiens
  source 1..20: mol_type = other RNA
gtagaggagatggcgcaggg

SEQ ID NO: 770 - RNA, 22 nt, Homo sapiens
  source 1..22: mol_type = other RNA
aggcagcggggtgtagtggata

SEQ ID NO: 771 - RNA, 22 nt, Homo sapiens
  source 1..22: mol_type = other RNA
tccattacactaccctgcctct

SEQ ID NO: 772 - RNA, 22 nt, Homo sapiens
  source 1..22: mol_type = other RNA
gtgaacgggcgccatcccgagg

SEQ ID NO: 773 - RNA, 21 nt, Homo sapiens
  source 1..21: mol_type = other RNA
cttgggagccctgttagactc

SEQ ID NO: 774 - RNA, 21 nt, Homo sapiens
  source 1..21: mol_type = other RNA
tactcaaaaagctgtcagtca

SEQ ID NO: 775 - RNA, 21 nt, Homo sapiens
  source 1..21: mol_type = other RNA
ttaatatcggacaaccattgt

SEQ ID NO: 776 - RNA, 21 nt, Homo sapiens
  source 1..21: mol_type = other RNA
tacttggaaaggcatcagttg

SEQ ID NO: 777 - RNA, 22 nt, Homo sapiens
  source 1..22: mol_type = other RNA
tgcaacgaacctgagccactga

SEQ ID NO: 778 - RNA, 22 nt, Homo sapiens
  source 1..22: mol_type = other RNA
tgcaacttacctgagtcattga

SEQ ID NO: 779 - RNA, 21 nt, Homo sapiens
  source 1..21: mol_type = other RNA
cactgtgtcctttctgcgtag

SEQ ID NO: 780 - RNA, 22 nt, Homo sapiens
  source 1..22: mol_type = other RNA
cactggctcctttctgggtaga

SEQ ID NO: 781 - RNA, 23 nt, Homo sapiens
  source 1..23: mol_type = other RNA
gcagcagagaataggactacgtc

SEQ ID NO: 782 - RNA, 20 nt, Homo sapiens
  source 1..20: mol_type = other RNA
agagtcttgtgatgtcttgc

SEQ ID NO: 783 - RNA, 23 nt, Homo sapiens
  source 1..23: mol_type = other RNA
aggttgggatcggttgcaatgct

SEQ ID NO: 784 - RNA, 22 nt, Homo sapiens
  source 1..22: mol_type = other RNA
tattgcacttgtcccggcctgt

SEQ ID NO: 785 - RNA, 22 nt, Homo sapiens
  source 1..22: mol_type = other RNA
tattgcactcgtcccggcctcc

SEQ ID NO: 786 - RNA, 22 nt, Homo sapiens
  source 1..22: mol_type = other RNA
tgtgcgcagggagacctctccc

SEQ ID NO: 787 - RNA, 22 nt, Homo sapiens
  source 1..22: mol_type = other RNA
tgtctactactggagacactgg

SEQ ID NO: 788 - RNA, 23 nt, Homo sapiens
  source 1..23: mol_type = other RNA
ccagttaccgcttccgctaccgc

SEQ ID NO: 789 - RNA, 23 nt, Homo sapiens
  source 1..23: mol_type = other RNA
caaagtgctgttcgtgcaggtag

SEQ ID NO: 790 - RNA, 22 nt, Homo sapiens
  source 1..22: mol_type = other RNA
acagtagagggaggaatcgcag

SEQ ID NO: 791 - RNA, 22 nt, Homo sapiens
  source 1..22: mol_type = other RNA
atccgcgctctgactctctgcc

SEQ ID NO: 792 - RNA, 24 nt, Homo sapiens
  source 1..24: mol_type = other RNA
tggggagctgaggctctgggggtg

SEQ ID NO: 793 - RNA, 21 nt, Homo sapiens
  source 1..21: mol_type = other RNA
aaggcagggcccccgctcccc

SEQ ID NO: 794 - RNA, 23 nt, Homo sapiens
  source 1..23: mol_type = other RNA
cacccggctgtgtgcacatgtgc

SEQ ID NO: 795 - RNA, 22 nt, Homo sapiens
  source 1..22: mol_type = other RNA
cacatggccgaaacagagaagt

SEQ ID NO: 796 - RNA, 22 nt, Homo sapiens
  source 1..22: mol_type = other RNA
tcttctctgttttggccatgtg

SEQ ID NO: 797 - RNA, 22 nt, Homo sapiens
  source 1..22: mol_type = other RNA
aaattattgtacatcggatgag

SEQ ID NO: 798 - RNA, 22 nt, Homo sapiens
  source 1..22: mol_type = other RNA
ttcaacgggtatttattgagca

SEQ ID NO: 799 - RNA, 23 nt, Homo sapiens
  source 1..23: mol_type = other RNA
tttggcactagcacatttttgct

SEQ ID NO: 800 - RNA, 22 nt, Homo sapiens
  source 1..22: mol_type = other RNA
ctatacaacttactactttccc

SEQ ID NO: 801 - RNA, 22 nt, Homo sapiens
  source 1..22: mol_type = other RNA
tgaggtagtaagttgtattgtt

SEQ ID NO: 802 - RNA, 22 nt, Homo sapiens
  source 1..22: mol_type = other RNA
aacccgtagatccgatcttgtg

SEQ ID NO: 803 - RNA, 22 nt, Homo sapiens
  source 1..22: mol_type = other RNA
cacccgtagaaccgaccttgcg

SEQ ID NO: 804 - DNA, 22 bp, Homo sapiens
  source 1..22: mol_type = other DNA
caaacaccattgtcacactcca

SEQ ID NO: 805 - DNA, 20 bp, Homo sapiens
  source 1..20: mol_type = other DNA
ggcattcaccgcgtgcctta

SEQ ID NO: 806 - DNA, 24 bp, Homo sapiens
  source 1..24: mol_type = other DNA
tcacaggttaaagggtctcaggga

SEQ ID NO: 807 - DNA, 22 bp, Homo sapiens
  source 1..22: mol_type = other DNA
cgcattattactcacggtacga

SEQ ID NO: 808 - DNA, 22 bp, Homo sapiens
  source 1..22: mol_type = other DNA
cacattattactcacggtacga

SEQ ID NO: 809 - DNA, 22 bp, Homo sapiens
  source 1..22: mol_type = other DNA
agccaagctcagacggatccga

SEQ ID NO: 810 - DNA, 21 bp, Homo sapiens
  source 1..21: mol_type = other DNA
aaagagaccggttcactgtga

SEQ ID NO: 811 - DNA, 21 bp, Homo sapiens
  source 1..21: mol_type = other DNA
aaagagaccggttcactgtgg

SEQ ID NO: 812 - DNA, 22 bp, Homo sapiens
  source 1..22: mol_type = other DNA
atactttttggggtaagggctt

SEQ ID NO: 813 - DNA, 21 bp, Homo sapiens
  source 1..21: mol_type = other DNA
gcaagcccagaccgcaaaaag

SEQ ID NO: 814 - DNA, 22 bp, Homo sapiens
  source 1..22: mol_type = other DNA
atgccctttcatcattgcactg

SEQ ID NO: 815 - DNA, 21 bp, Homo sapiens
  source 1..21: mol_type = other DNA
gtagtgcaacagggaaagagt

SEQ ID NO: 816 - DNA, 22 bp, Homo sapiens
  source 1..22: mol_type = other DNA
cagctggttgaaggggaccaaa

SEQ ID NO: 817 - DNA, 22 bp, Homo sapiens
  source 1..22: mol_type = other DNA
tagctggttgaaggggaccaaa

SEQ ID NO: 818 - DNA, 23 bp, Homo sapiens
  source 1..23: mol_type = other DNA
ttggtgactaggtggcccacagg

SEQ ID NO: 819 - DNA, 23 bp, Homo sapiens
  source 1..23: mol_type = other DNA
ctacgcgtattcttaagcaataa

SEQ ID NO: 820 - DNA, 22 bp, Homo sapiens
  source 1..22: mol_type = other DNA
atacatacttctttacattcca

SEQ ID NO: 821 - DNA, 21 bp, Homo sapiens
  source 1..21: mol_type = other DNA
gagctacagtgcttcatctca

SEQ ID NO: 822 - DNA, 22 bp, Homo sapiens
  source 1..22: mol_type = other DNA
agaacagtatttccaggaatcc

SEQ ID NO: 823 - DNA, 23 bp, Homo sapiens
  source 1..23: mol_type = other DNA
agggattcctgggaaaactggac

SEQ ID NO: 824 - DNA, 22 bp, Homo sapiens
  source 1..22: mol_type = other DNA
acccttatcagttctccgtcca

SEQ ID NO: 825 - DNA, 22 bp, Homo sapiens
  source 1..22: mol_type = other DNA
taaccaatgtgcagactactgt

SEQ ID NO: 826 - DNA, 23 bp, Homo sapiens
  source 1..23: mol_type = other DNA
gaacaggtagtctgaacactggg

SEQ ID NO: 827 - DNA, 22 bp, Homo sapiens
  source 1..22: mol_type = other DNA
aggcataggatgacaaagggaa

SEQ ID NO: 828 - DNA, 22 bp, Homo sapiens
  source 1..22: mol_type = other DNA
acaaaccttttgttcgtcttat

SEQ ID NO: 829 - DNA, 22 bp, Homo sapiens
  source 1..22: mol_type = other DNA
actgcctgtctgtgcctgctgt

SEQ ID NO: 830 - DNA, 23 bp, Homo sapiens
  source 1..23: mol_type = other DNA
tccaatcagttcctgatgcagta

SEQ ID NO: 831 - DNA, 21 bp, Homo sapiens
  source 1..21: mol_type = other DNA
agaattgcgtttggacaatca

SEQ ID NO: 832 - DNA, 22 bp, Homo sapiens
  source 1..22: mol_type = other DNA
tggggtatttgacaaactgaca

SEQ ID NO: 833 - DNA, 22 bp, Homo sapiens
  source 1..22: mol_type = other DNA
acaaccagctaagacactgcca

SEQ ID NO: 834 - DNA, 22 bp, Homo sapiens
  source 1..22: mol_type = other DNA
aactcagtaatggtaacggttt

SEQ ID NO: 835 - DNA, 21 bp, Homo sapiens
  source 1..21: mol_type = other DNA
ttttggtgcatatttacttta

SEQ ID NO: 836 - DNA, 22 bp, Homo sapiens
  source 1..22: mol_type = other DNA
aactatacaacctactacctca

SEQ ID NO: 837 - DNA, 23 bp, Homo sapiens
  source 1..23: mol_type = other DNA
tcatacagctagataaccaaaga

SEQ ID NO: 838 - protein, 9 aa, synthetic construct
  VARIANT 5: note = Xaa can be any naturally occurring amino acid
VYPYXEFVL

SEQ ID NO: 839 - protein, 9 aa, synthetic construct
  VARIANT 6: note = Xaa can be any naturally occurring amino acid
KLNPNXIAS

SEQ ID NO: 840 - protein, 9 aa, synthetic construct
  VARIANT 5: note = Xaa can be any naturally occurring amino acid
ITTVXTFID

SEQ ID NO: 841 - protein, 9 aa, synthetic construct
  VARIANT 5: note = Xaa can be any naturally occurring amino acid
VDTDXTQQQ

SEQ ID NO: 842 - protein, 9 aa, synthetic construct
  VARIANT 5: note = Xaa can be any naturally occurring amino acid
VPSTXLLLF

SEQ ID NO: 843 - DNA, 32767 bp, synthetic construct
  source 1..32767: mol_type = other DNA
aaaaaagctgaacgagaaacgtaaaatgatataaatatcaatatattaaattagattttgcataaaaaacagactacataatactgtaaaacacaacatatccagtcactatgaatcaactacttagatggtattagtgacctgtagtcgaccgacagccttccaaatgttcttcgggtgatgctgccaacttagtcgaccgacagccttccaaatgttcttctcaaacggaatcgtcgtatccagcctactcgctattgtcctcaatgccgtattaaatcataaaaagaaataagaaaaagaggtgcgagcctcttttttgtgtgacaaaataaaaacatctacctattcatatacgctagtgtcatagtcctgaaaatcatctgcatcaagaacaatttcacaactcttatacttttctcttacaagtcgttcggcttcatctggattttcagcctctatacttactaaacgtgataaagtttctgtaatttctactgtatcgacctgcagactggctgtgtataagggagcctgacatttatattccccagaacatcaggttaatggcgtttttgatgtcattttcgcggtggctgagatcagccacttcttccccgataacggagaccggcacactggccatatcggtggtcatcatgcgccagctttcatccccgatatgcaccaccgggtaaagttcacgggagactttatctgacagcagacgtgcactggccagggggatcaccatccgtcgcccgggcgtgtcaataatatcactctgtacatccacaaacagacgataacggctctctcttttataggtgtaaaccttaaactgcatttcaccagcccctgttctcgtcagcaaaagagccgttcatttcaataaaccgggcgacctcagccatcccttcctgattttccgctttccagcgttcggcacgcagacgacgggcttcattctgcatggttgtgcttaccagaccggagatattgacatcatatatgccttgagcaactgatagctgtcgctgtcaactgtcactgtaatacgctgcttcatagcatacctctttttgacatacttcgggtatacatatcagtatatattcttataccgcaaaaatcagcgcgcaaatacgcatactgttatctggcttttagtaagccggatccacgcggcgtttacgccccccctgccactcatcgcagtactgttgtaattcattaagcattctgccgacatggaagccatcacaaacggcatgatgaacctgaatcgccagcggcatcagcaccttgtcgccttgcgtataatatttgcccatggtgaaaacgggggcgaagaagttgtccatattggccacgtttaaaaaggccgtaatatccagctgaacggtctggttataggtacattgagcaactgactgaaatgcctcaaaatgttctttacgatgccattgggatatatcaacggtggtatatccagtgatttttttctccattttagcttccttagctcctgaaaatctcgataactcaaaaaatacgcccggtagtgatcttatttcattatggtgaaagttggaacctcttacgtgccgatcaacgtctcattttcgccaaaagttggcccagggcttcccggtatcaacagggacaccaggatttatttattctgcgaagtgatcttccgtcacaggtatttattcggcgcaaagtgcgtcgggtgatgctgccaacttagtcgactacaggtcactaataccatctaagtagttgattcatagtgactggatatgttgtgttttacagtattatgtagtctgttttttatgcaaaatctaatttaatatattgatatttatatcattttacgtttctcgttcagctttcttgtacaaagtggttttaatggaccgcccgcaagggggggggggcatttcagtgtcgggtgacgagcgcgatccggccgggatcctaggaccccaaaagtttgtctgcgtattccagggcggggctcagttgaatctcccgcagcacctctaccagcaggtccgcggtgggctggagaaactcggccgtcccggggcaggcggttgtcgggggtggaggcgcggcgcccaccccgtgtgccgcgcctggcgtctcctctgggggcgacccgtaaatggttgcagtgatgtaaatggtgtccgcggtccagaccacggtcaaaatgccggccgtggcgctccgggcgctttcgccgcgcgaggagctgacccaggagtcgaacggatacgcgtacatatgggcgtcccacccgcgttcgagcttctggttgctgtcccggcctataaagcggtaggcacaaaattcggcgcgacagtcgataatcaccaacagcccaatgggggtgtgctggataacaacgcctccgcgcggcaggcggtcctggcgctcccggccccgtaccatgatcgcgcgggtgccgtactcaaaaacatgcaccacctgcgcggcgtcgggcagtgcgctggtcagcgaggccctggcgtggcataggctatacgcgatggtcgtctgtggattggacatctcgcggtgggtagtgagtcccccgggccgggttcggtggaactgtaaggggacggcgggttaatagacaatgaccacgttcggatcgcgcagagccgatagtatgtgctcactaatgacgtcatcgcgctcgtggcgctcccggagcggatttaagttcatgcgaaggaattcggaggaggtggtgcgggacatggccacgtacgcgctgttgaggcgcaggttgccgggcgtaaagcagatggcgaccttgtccaggctaaggccctgggagcgcgtgatggtcatggcaagcttggagctgatgccgtagtcggcgtttatggccatggccagctccgtagagtcaatggactcgacaaactcgctgatgttggtgttgacgacggacatgaagccgtgttggtcccgcaagaccacgtaaggcaggggggcctcttccagtaactcggccacgttggccgtcgcgtgccgcctccgcagctcgtccgcaaaggcaaacacccgtgcgtacgtgtatcccatgagcgtataattgtccgtctgcagggcgacggacatcagccccccgcgcggcgagccggtcagcatctcgcagccccggaagataacgttgtccacgtacgtgctaaagggggcgacttcaaatgcctccccgaagagctcttggaggattcggaatctcccgaggaaggcccgcttcagcagcgcaaactgggtgtgaacggcggcggtggtctccggttccccgggggtgtagtggcagtaaaacacgtcgagctgttgttcgtccagccccgcgaaaataacgtcgaggtcgtcgtcgggaaaatcgtccgggcccccgtcccgcggccccagttgcttaaaatcaaacgcacgctcgccgggggcgcctgcgtcggccattaccgacgcctgcgtcggcacccccgaagatttggggcgcagagacagaatctccgccgttagttctcccatgcgggcgtaggcgagggtcctctgggtcgcatccaggcccgggcgctgcagaaagttgtaaaaggagataagcccgctaaatatgagccgcgacaggaacctgtaggcaaactccaccgaagtctccccctgagtctttacaaagctgtcgtcacgcaacactgcctcgaaggcccggaacgtcccactaaacccaaaaaccagttttcgcaggcgcgcggtcaccgcgatctggctgttgaggacgtaagtgacgtcgttgcgggccacgaccagctgctgtttgctgtgcacctcgcagcgcatgtgccccgcgtcctggtcctggctctgcgagtagttggtgatgcggctggcgttggccgtgagccacttttcaatcgtcaggccgggctggtgtgtcagccgtcggtattcgtcaaactccttgaccgacacgaacgtaagcacggggagggtgaacacgacgaactccccctcacgggtcaccttcaggtaggcgtggagcttggccatgtacgcgctcacctctttgtgggaggagaacagccgcgtccagccggggaggttggcggggttggtgatgtagttttccgggacgacgaagcgatccacgaactgcatgtgctcctcggtgatgggcaggccgtactccagcaccttcatgaggttaccgaactcgtgctcgacgcaccgtttgttgttaataaaaatggcccagctatacgagaggcgggcgtactcgcgcagcgtgcggttgcagatgaggtacgtgagcacgttctcgctctggcggacggaacaccgcagtttctggtgctcgaaggtcgactccagggacgccgtctgcgtcggcgagcccacacacaccaacacgggccgcaggcgggccgcgtactggggggtgtggtacagggcgttaatcatccaccagcaatacaccacggccgtgaggaggtgacgcccaaggagcccggcctcgtcgatgacgatcacgttgctgcgggtaaaggccggcagcgccccgtgggtggccggggccaaccgcgtcagggcgccctcggccaaccccagggtccgttccagggcggccagggcgcgaaactcgttccgcaactcctcgcccccggaggcggccagggcgcgcttcgtgaggtccaaaatcacctcccagtagtacgtcagatctcgtcgctgcaggtcctccagcgaggcggggttgctggtcagggtgtacgggtactgtcccagttgggcctggacgtgattcccgcgaaacccaaattcatgaaagatggtgttgatgggtcggctgagaaaggcgcccgagagtttggcgtacatgttttgggccgcaatgcgcgtggcgcccgtcaccacacagtccaagacctcgttgattgtctgcacgcacgtgctctttccggagccagcgttgccggtgataagatacaccgcgaacggaaactccctgaggggcaggcctgcgggggactctaaggccgccacgtcccggaaccactgcagatggggcacttgcgctccgtcgagctgttgttgcgagagctctcggatgcgcttaaggattggctgcaccccgtgcatagacgtaaaatttaaaaaggcctcggccctccctggaacggctggtcggtccccgggttgctgaaggtgcggcgggccgggtttctgtccgtctagctggcgctccccgccggccgccgccatgaccgcaccacgctcgcgggcccccactacgcgtgcgcggggggacacggaagcgctgtgctcccccgaggacggctgggtaaaggttcaccccagccccggtacgatgctgttccgcgagattctccacgggcagctggggtataccgagggccagggggtgtacaacgtcgtccggtccagcgaggcgaccacccggcagctgcaggcggcgatctttcacgcgctcctcaacgccaccacttaccgggacctcgaggcggactggctcggccacgtggcggcccgcggtctgcagccccaacggctggttcgccggtacaggaacgcccgggaggcggatatcgccggggtggccgagcgggtgttcgacacgtggcggaacacgcttaggacgacgctgctggactttgcccacgggttggtcgcctgctttgcgccgggcggcccgagcggcccgtcaagcttccccaaatatatcgactggctgacgtgcctggggctggtccccatattacgcaagcgacaagaagggggtgtgacgcagggtctgagggcgtttctcaagcagcacccgctgacccgccagctggccacggtcgcggaggccgcggagcgcgccggccccgggttttttgagctggcgctggccttcgactccacgcgcgtggcggactacgaccgcgtgtatatctactacaaccaccgccggggcgactggctcgtgcgagaccccatcagcgggcagcgcggagaatgtctggtgctgtggccccccttgtggaccggggaccgtctggtcttcgattcgcccgtccagcggctgtttcccgagatcgtcgcgtgtcactccctccgggaacacgcgcacgtctgccggctgcgcaataccgcgtccgtcaaggtgctgctggggcgcaagagcgacagcgagcgcggggtggccggtgccgcgcgggtcgttaacaaggtgttgggggaggacgacgagaccaaggccgggtcggccgcctcgcgcctcgtgcggcttatcatcaacatgaagggcatgcgccacgtaggcgacattaacgacaccgtgcgttcctacctcgacgaggccggggggcacctgatagacgccccggccgtcgacggtaccctccctggattcggcaagggcggaaacagccgcgggtctgcgggccaggaccagggggggcgggcgccgcagcttcgccaggccttccgcacggccgtggttaacaacatcaacggcgtgttggagggctatataaataacctgtttggaaccatcgagcgcctgcgcgagaccaacgcgggcctggcgacccaattgcaggagcgcgaccgcgagctccggcgcgcaacagcgggggccctggagcgccagcagcgcgcggccgacctggcggccgagtccgtgaccggtggatgcggcagccgccctgcgggggcggacctgctccgggccgactatgacattatcgacgtcagcaagtccatggacgacgacacgtacgtcgccaacagctttcagcacccgtacatcccttcgtacgcccaggacctggagcgcctgtcgcgcctctgggagcacgagctggtgcgctgttttaaaattctgtgtcaccgcaacaaccagggccaagagacgtcgatctcgtactccagcggggcgatcgccgcattcgtcgccccctactttgagtcagtgcttcgggccccccgggtaggcgcgcccatcacgggctccgatgtcatcctgggggaggaggagttatgggatgcggtgtttaagaaaacccgcctgcaaacgtacctgacagacatcgcggccctgttcgtcgcggacgtccagcacgcagcgctgcccccgcccccctccccggtcggcgccgatttccggcccggcgcgtccccgcggggccggtccagatcgcggtcgcccggaagaactgcgcgaggcgcgccggaccagggcgggggcatcgggcaccgggatggccgccgcgacggccgacgatgaggggtcggccgccaccatcctcaagcaggccatcgccggggaccgcagcctggtcgaggcggccgaggcgattagccagcagacgctgctccgcctggcctgcgaggtgcgccaggtcggcgaccgccagccgcggtttaccgccaccagcatcgcgcgcgtcgacgtcgcgcctgggtgccggttgcggttcgttctggacgggagtcccgaggacgcctatgtgacgtcggaggattactttaagcgctgctgcggccagtccagttatcgcggcttcgcggtggcggtcctgacggccaacgaggaccacgtgcacagcctggccgtgccccccctcgttctgctgcaccggttctccctgttcaaccccagggacctcctggactttgagcttgcctgtctgctgatgtacctggagaactgcccccgaagccacgccaccccgtcgacctttgccaaggttctggcgtggctcggggtcgcgggtcgccgcacgtccccattcgaacgcgttcgctgccttttcctccgcagttgccactgggtcctaaacacactcatgttcatggtgtacgtaaaaccgttcgacgacgagttcgtcctgccccactggtacatggcccggtacctgctggccaacaacccgccccccgttctctcggccctgttctgtgccaccccgacgagctcctcattccggctgccggggccgcccccccgctccgactgcgtggcctataaccccgccgggatcatggggagctgctgggcgtcggaggaggtgcgcgcgcctctggtctattggtggctttcggagaccccaaaacgacagacgtcgtcgctgttttatcagttttgttgaattttaggaaataaacccggttttgtttctgtggcctcccgacggatgcgcgtgtccttactccgtcttggtgggtgggtggctgtgtatggcgtcccatctgtgcggggaggggggcaagtcggcacgtattcggacagactcaagcacataagacgaacaaaaggtttgtaacttcgtaccgtgagtaataatgtggactttattgcttaagaatacgcgtagagaaataagacgaacaaaaggtttgtgattttattgcttaagaatacgcgtagatggtcgtaccgtgagtaataatgtggttcataagacgaacaaaaggtttgtgacattattgcttaagaatacgcgtaggtggtcgtaccgtgagtaataatgtgtactttattgcttaagaatacgcgtaggctatcgtaccgtgagtaataatgtgccttataagacgaacaaaaggtttgtacacgggggagcgctcttgtctcagggcaatgtttttattggtcaaactcaggcaaacagaaacgacatcttgtcgtcaaagggatacacaaacttccccccctcgccccatactcccgccagcaccccggtaaacaccaactcaatctcgcgcaggatttcgcgcaggtgatgagcgcagtccacgggggggagcacaaggggccgcgggtatagatcgacggggacgccgaccgactccccgcctccgggacagacacgcacgacgcgccgccagtagtgctctgcgtccagcaaggcgccgccgcggaaggcagtggggggcaaggggtcgctggcctcaaagggggacacccgaacgctccagtactccgcgtccaaccgtttattaaacgcgtccaagataaggcggtcgcaggcgtcctccataaggccccgggccgtgagtgcgtcctcctccggcacgcatgccgttgtcaggcccaggacccgtcgcagcgtgtcgcgtacgacccctgccgccgtggtgtacgcgggcccgcggagaggaaatcccccaagatggtcagtgttgtcgcgggagttccagaaccacactcccgcctggctccaggcgactgcgtgggtgtagacgccctcgagggccaggcacagtgggtgccgcagccggacggcgttggccctaagcacggctcccacggccgtctcgatggcccgccgggcgtcctcgatcaccccggaagccgcatccgcgtcttgggggtccacgttaaagacaccccagaacgcacccccatcgcccccgcagaccgcgaacttcaccgagctggccgtctcctcgatctgcaggcagacggcggccattaccccacccaggagctgccgcagcgcagggcaggcgttgcacgtgtccgggaccaggcgctccaagacggccccggcccagggctctgagggagcggccaccaccagcgcgtccagtcttgctaggcccgtccggccgtgggggtccgccagcccgctccccccgaggtcggccagggccgccaggagctgggcgcgaagtccggggaagcaaaaccgcgccgtccagacgggcccgacggccgcgggcgggtctaacagttggatgattttagtggcgggatgccaccgcgccaccgcctcccgcaccgcgggcaggaggcatccggctgccgccgaggccacgccgggccaggctcgcggggggaggacgaccctggcccccaccgcgggccaggcccccaggagcgcggcgtaagcggccgcggccccgcgcaccaggtcccgtgccgactcggccgtggccggcacggtgaacgtgggccaacccggaaaccccaggacggcaaagtacgggacgggtcccccccggacctcaaactcgggccccagaaaggcaaagacgggggccagggccccgggggcggcgtggaccgtggtatgccactgccggaaaagggcgacgagcgccggcgcggagaacttctcgccggcgcttacaaagtagtcgtaatcgcggggcagcagcacccgtgccgtgactcgttgcgggtgcccgcgtggccgcaggcccacctcgcacacctcgaccaggtccccgaacgcgccctccttcttgatcggcggaaacgcaagagtctggtattcgcgcgcaaatagcgcggttccggtggtgatgttaacggtcagcgaagcggcggacgcgcactggggggtgtcgcgaatggccgccaggcgcgcccacgccagccgcgcgtcgggatgctcggcaacgcgcgccgccagggccatagggtcgatgtcaatgttggcctccgcgaccaggagagcggcgcgaggggcggcgggcgggccccacgacgctctctcaactttcaccaccagtcccgtgcgtgggtccgagccgatacgcagcggggcgaacagggccaccggcccggtctggcgctccagggccgccaggacgcacgcgtacagcgcccgccacagagtcgggttctccaggggctccagcggggaggcggccggcgtcgtcgcggcgcgggcggccgccacgacggcctggacggagacgtccgcggagccgtagaaatcccgcagctccgtcgcggtgacggagacctccgcaaagcgcgcgcgaccctcccctgcggcgttgcgacatacaaaatacaccagggcgtggaagtactcgcgagcgcgggggggcagccataccgcgtaaagggtaatggcgctgacgctctcctccacccacacgatatctgcggtgtccatcgcacggcccctaaggatcacgggcggtctgtgggtcccatgctgccgtgcctggccgggcccggtgggtcgcggaaaccggtgacggggggggggcggtttttggggttggggtgggggtgggaaacggcccgggtccgggggccaacttggcccctcggtgcgttccggcaacagcgccgccggtccgcggacgaccacgtaccgaacgagtgcggtcccgagacttatagggtgctaaagttcaccgccccctgcatcatgggccaggcctcggtggggagctccgacagcgccgcctccaggatgatgtcagcgttggggttggcgctggatgagtgcgtgcgcaaacagcgcccccacgcgggcacgcgtagcttgaagcgcgcgcccgcaaactcccgcttgtgggccataagcagggcgtacagctgcctgtgggtccggcaggcgctgtggtcgatgtggtgggcgtccaacaaccccacgattgtctgtttggtgaggtttttaacgcgccccgccccgggaaacgtctgcgtgcttttggccatctgcacgccaaacagttcgccccagattatcttgaacagcgccaccgcgtggtccgtctcgctaacggacccgcgcgggggacagccgcttagggcgtcggcgacgcgcttgacggcttcctccgagagcagaagtccgtcggttacgttacagtggcccagttcgaacaccagctgcatgtagcggtcgtagtggggggtcagtaggtccagcacgtcatcggggccgaaggtcctcccagatcccccggccgccgagtcccaatgcaggcgcgcggccatggtgctgcacaggcacaacagctcccagacgggggttacgttcagggtggggggcagggccacgagctccagctctccggtgacgttgatcgtggggatgacgcccgtggcgtagtggtcatagatccgccgaaatatggcgctgctgcgggtggccatgggaacgcggagacaggcctccagcaacgccaggtaaataaaccgcgtgcgtcccatcaggctgttgaggttgcgcatgagcgcgacaatttccgccggcgcgacatcggaccggaggtatttttcgacgaaaagacccacctcctccgtctcggcggcctgggccggcagcgacgcctcgggatcccggcaccgcagctcccgtagatcgcgctgggccctgagggcgtcgaaatgtacgccccgcaaaaacagacagaagtcctttggggtcagggtatcgtcgtgtccccagaagcgcacgcgtatgcagtttagggtcagcagcatgtgaaggatgttaaggctgtccgagagacacgccagcgtgcatctctcaaagtagtgtttgtaacggaatttgttgtagatgcgcgacccccgccccagcgacgtgtcgcatgccgacgcgtcacagcgccccttgaaccggcgacacagcaggtttgtgacctgggagaactgcgcgggccactggccgcaggaactgaccacgtgattaaggagcatgggcgtaaagacgggctccgagcgcgccccggagccgtccatgtaaatcagtagctcccccttgcggagggtgcgcacccgtcccagggactggtacacggacaccatgtccggtccgtagttcatgggtttcacgtaggcgaacatgccatcaaagtgcaggggatcgaagctgaggcccacggttacgaccgtcgtgtatataaccacgcggtattggccccacgtggtcacgtccccgaggggggtgagcgagtgaagcaacagcacgcggtccgtaaactgacggcagaaccgggccacgatctccgcgaaggagaccgtcgacgaaaaaatgcagatgttatcgcccccgccaaggcgcgcttccagctccccaaagaacgtggccccccgggcctccggagaggcgtccggagacgggccgctcggcggcccgggcgggcgcagggcagcctgcaggagctcggtccccagacgcgggagaaacaggcaccggcgcgccgaaaacccgggcatggcgtactcgccgaccaccacatgcacgtttttttcgccccggagaccgcacaggaagtccaccaactgcgcgttggcggttgcgtccatggcgatgatccgaggacagatgcgcagcaggcgtagcattaacgcatccacgcggcccagttgctgcatcgttggcgaatagagctggcccagcgtcgacataacctcgtccagaacgaggacgtcgtagttgttcagaaggttggggcccacgcgatgaaggctttccacctggacgataagtcggtggaaggggcggtcgttcataatgtaattggtggatgagaagtaggtgacaaagtcgaccaggcctgactcagcgaaccgcgtcgctagggtctgggtaaaactccgacgacaggagacgacgagcacactcgtgtccggagagtggatcgcttcccgcagccagcggatcagcgcggtagtttttcccgaccccattggcgcgcggaccacagtcacgcacctggccgtcggggcgctcgcgttggggaaggtgacgggtccgtgctgctgccgctcgatcgttgttttcgggtgaacccggggcacccattcggccaaatcccccccgtacaacatccgcgctagcgatacgctcgacgtgtactgttcgcactcgtcgtccccaatgggacgcccggcccccagaggatctcccgactccgcgccccccacgaaaggcatgaccggggcgcggacggcgtggtgggtctggtgtgtgcaggtggcgacgtttgtggtctctgcggtctgcgtcacggggctcctcgtcctggcctctgtgttccgggcacggtttccctgcttttacgccacggcgagctcttatgccggggtgaactccacggccgaggtgcgcgggggtgtagccgtgcccctcaggttggacacgcagagccttgtgggcacttatgtaatcacggccgtgttgttgttggccgtggccgtgtatgccgtggtcggcgccgtgacctcccgctacgaccgcgccctggacgcgggccgccgtctggctgcggcccgcatggccatgccgcacgccacgctgatcgccggaaacgtctgctcttggttgctgcagatcaccgtcctgttgctggcccatcgcatcagccagctggcccacctggtttacgtcctgcactttgcgtgtctggtgtattttgcggcccatttttgcaccaggggggtcctgagcgggacgtatctgcgtcaggtgcacggcctgatggagctggccccgacccatcatcgcgtcgtcggcccggctcgcgccgtgctgacaaacgccttgctgttgggcgtcttcctgtgcacggccgacgccgcggtatccctgaataccatcgccgcgttcaactttaatttttcggccccgggcatgctcatctgcctgaccgtgctgttcgccattctcgtcgtatcgctgttgttggtggtcgagggggtgttgtgtcactacgtgcgcgtgttggtgggcccccacctgggggccgtggccgccacgggcatcgtcggcctggcctgcgagcactattacaccaacggctactacgttgtggagacgcagtggccgggggctcagacgggagtccgcgtcgccctcgccctggtcgccgcctttgccctcggcatggccgtgctccgctgcacccgcgcctatctgtatcacaggcggcaccacaccaaattttttatgcgcatgcgcgacacgcgacaccgcgcacattccgccctcaagcgcgtacgcagttccatgcgcggatcgcgagacggccgccacaggcccgcacccggcagcccgcccgggattcccgaatatgcggaagacccctacgcgatctcatacggcggccagctcgaccggtacggagattccgacggggagccgatttacgacgaggtggcggacgaccaaaccgacgtattgtacgccaagatacaacacccgcggcacctgcccgacgacgatcccatctatgacaccgttggggggtacgaccccgagcccgccgaggaccccgtgtacagcaccgtccgccgttggtagctgtttggttccgttttaataaaccgtttgtgtttaacccgaccgtggtgtatgtctggtgtgtggcgtccgatcccgttactatcaccgtccccccccccccctcaaccccggcgattgtgggttttttaaaaacgacacgcgtgcgaccgtatacagaacattgttttggtttttattcgctatcggacatggggggtggaaactgggtggcggggcaggcgcctccgggggtccgccggtgagtgtggcgcgagggggggtccgatgaacgcaggcgctgtctccccggggcccgcgtaaccccgcgcatatccgggggcacgtagaaattaccttcctcttcggactcgatatccacgacgtcaaagtcgtgggcggtcagcgagacgacctccccgtcgtcggtgatgaggacgttgtttcggcagcagcagggccgggccccggagaacgagaggcccatagctcggcgagcgtgtcgtcgaatgccaggcggctgcttcgctggatggccttatagatctccggatcgatgcggacgggggtaatgatcagggcgatcggaacggcctggttcgggagaatggacgccttgctgggtcctgcggccccgagagccccggcgccgtcctccaggcggaacgttacgccctcctccgcgctggtgcggtgcctgccgataaacgtcaccagatgcgggtggggggggcagtcggggaagtggctgtcgagcacgtagccctgcaccaagatctgcttaaagttcgggtgacgggggttcgcgaagacgggctcgcggcggaccagatccccggagctccaggacacgggggagatggtgtggcgtccgaggtcgggggcgccaaacagaagcacctccgagacaacgccgctatttaactccaccaaggcccgatccgcggcggagcaccgccttttttcgcccgaggcgtgggcctctgaccaggcctggtcttgcgtgacgagagcctcctccgggccggggacgcgcccgggcgcgaagtatcgcacgctgggcttcgggatcgaccggataaatgcccggaacgcctccggggaccggtgtgccatcaagtcctcgtacgcggaggccgtggggtcgctggggtccatggggtcgaaagcgtacttggcccggcatttgacctcgtaaaaggccaggggggtcttggggactggggccaggtagccgtgaatgtcccgaggacagacgagaatatccagggacgccccgaccatccccgtgtgaccgtccatgaggaccccacacgtatgcacgttctcttcggcgaggtcgctgggttcgtggaagataaagcgccgcgtgtcggcgccggcctcgccgccgtcgtccgcgcggcccacgcagtagcgaaacagcaggcttcgggccgtcggctcgttcacccgcccgaacatcaccgccgaagactgtacatccggccgcaggctggcgttgtgcttcagccactggggcgagaaacacggaccctgggggccccagcggagggtggatgcggtcgtgaggccccgccggagcagggcccatagctggcagtcggcctggttttgcgtggccgcctcgtaaaaccccatgaggggccggggcgccacggcgtccgcggcggccgggggcccgcggcgcgtcaggcgccataggtgccgaccgagtccgcggtccaccatacccgcctcctcgaggaccacggccagggaacacagataatccaggcgggcccagaggggaccgatggccagaggggcgcggacgccgcgcagcaacccgcgcaggtggcgctcgaacgtctcggctagtatatgggagggcagcgcgttggggatcaccgacgccgaccacatagagtcaaggtccggggagtcgggatcggcgtccgggtcgcgggcgtgggtgcccccaggagatagcggaatgtctggggtcggaggccctgaggcgtcagaaagtgccggcgacgcggcccggggcttttcgtctgcggtgtcggtggcgtgctgatcacgtggggggttaacgggcgaatgggagctcgggtccacagctgatgtcgtctggggtggggggggcaggggacggaaggtggttgtcagcggaagactgttagggcgggggcgcttgggggggctgtcggggccacgaggggtgtcctcggccagggcccagggacgcttagtcacggtgcgtcccggcggacatgctgggcctaccgtggactccatttccgagacgacgtggggggagcggtggttgagcgcgccgccgggtgaacgctgattctcacgacagcgcgtgccgcgcgcacgggttggtgtgacacaggcgggacaccagcaccaggagaggcttaagctcgggaggcagcgccaccgacgacagtatcgccttgtgtgtgtgctggtaatttatacaccgatccgtaaacgcgcgccgaatcttgggattgcggaggtggcgccggatgccctctgggacgtcatacgccaggccgtgggtgttggtctcggccgagttgacaaacagggctgggtgcagcacgcagcgataggcgagcagggccagggcgaagtccggcgacagctggttgttaaaatactggtaaccgggaaaccgggtcacgggtacgcccaggctcggggcgacgtacacgctaaccaccaactccagcagcgtctggcccagggcgtacaggtcaaccgctaacccgacgtcgtgcttcaggcggtggttggtaaattcggcccgttcgttgttaaggtatttcaccaacagctccgggggctggttatacccgtgacccaccagggtgtgaaagttggctgtggttagggcggtgggcatgccaaacatccggggggacttgaggtccggctcctggaggcaaaactgcccccgggcgatcgtggagttggagttgagggtgacgaggctaaagtcggcgaggacggcccgccggagcgagacggcgtccgaccgcagcatgacgaggatgttggcgcacttgatatccaggtggctgatcccgcaggtggtgtttaaaaacacaacggcgcgggccagctccgtgaagcactggtggagggccgtcgagaccgaggggtttgttgtgcgcagggacgccagttggccgatatacttaccgaggtccatgtcgtacgcggggaacactatctgtcgttgttgcagcgagaacccgaggggcgcgatgaagccgcggatgttgtgggtgcggccggcgcgtagaacgcactccccgaccaacagggtcgcgatgagctcaacggcaaaccactccttttcctttatggtcttaacggcaagcttatgttcgcgaatcagttggacgtcaccgtatcccccagaccccccgaagcttcgggccccggggatctcgagggtcgtgtagtgtagggcggggttgatggcgaacacggggctgcatagcttgcggatgcgcgtgagggtgaggatgtgcgagggggacgaggggggtgcggttaacgccgcctgggatctgcgcaggggcgggcggttcagtttggccgccgtaccgggcgtctcgggggacgcgcggcgatgagacgagcggctcattcgccatcgggatagtcccgcgcgaagccgctcgcggaggccggatcggtggcgggacccgtgggaggagcgggagacggcggcgtcctggagagaggggccgctggggcgcccggaggccccgtgggggttggagtgtacgtaggatgcgagccaatccttgaaggaccgttggcgtgcaccttgggggctgaggttagctgccacatgaccagcaggtcgctgtctgcgggactcatccatccttcggccaggtcgccgtctccccacagagaagcgttggtcgctgcttcctcgagttgctcctcctggtccgcaagacgatcgtccacggcgtccaggcgctcaccaagcgccggatcgaggtaccgtcggtgtgcggttagaaagtcacgacgcgccgcttgctcctccacgcgaattttaacacaggtcgcgcgctgtcgcatcatctctaagcgcgcgcgggactttagccgcgcctccaattccaagtgggccgcctttgcagccataaaggcgccaacaaaccgaggatcttgggtgctgacgccctcccggtgcagctgcagggtctggtccttgtaaatctcggctcggaggtgcgtctcggccaggcgtcggcgcagggccgcgtgggcggcatctcggtccattccgccaccctgcgggcgacccggggggtgctctgatagtctcgcgtgcccaaggcccgtgatcggggtacttcgccgccgcgacccgccacccggtgtgcgcgatgtttggtcagcagctggcgtccgacgtccagcagtacctggagcgcctcgagaaacagaggcaacttaaggtgggcgcggacgaggcgtcggcgggcctcaccatgggcggcgatgccctacgagtgccctttttagatttcgcgaccgcgacccccaagcgccaccagaccgtggtccctggcgtcgggacgctccacgactgctgcgagcactcgccgctcttctcggccgtggcgcggcggctgctgtttaatagcctggtgccggcgcaactaaaggggcgtgatttcgggggcgaccacacggccaagctggaattcctggcccccgagttggtacgggcggtggcgcgactgcggtttaaggagtgcgcgccggcggacgtggtgcctcagcgtaacgcctactatagcgttctgaatacgtttcaggccctccaccgctccgaagcctttcgccagctggtgcactttgtgcgggactttgcccagctgctcaaaacctccttccgggcctccagcctcacggagaccacgggcccccccaaaaaacgggccaaggtggacgtggccacccacggccggacgtacggcacgctggagctgttccaaaaaatgatccttatgcacgccacctactttctggccgccgtgctcctcggggaccacgcggagcaggtcaacacgttcctgcgtctcgtgtttgagatccccctgtttagcgacgcggccgtgcgccacttccgccagcgcgccaccgtgtttctcgtcccccggcgccacggcaagacctggtttctggtgcccctcatcgcgctgtcgctggcctcctttcgggggatcaagatcggctacacggcgcacatccgcaaggcgaccgagccggtgtttgaggagatcgacgcctgcctgcggggctggttcggttcggcccgagtggaccacgttaaaggggaaaccatctccttctcgtttccggacgggtcgcgcagtaccatcgtgtttgcctccagccacaacacaaacgtaagtcctcttttctttcgcatggctctcccaaggggccccgggtcgacccgacccacacccacccacccacatacacacacaaccagacgcgggaggaaagtctgccccgtgggcactgatttttattcgggatcgcttgaggaggcccgggcaacggcccgggcaacggtggggcaactcgtagcaaataggcgactgatgtacgaagagaagacacacaggcgccacccggcgctggtcggggggatgttgtccgcgccgcaccgtcccccgacgacctcttgcagacggtccgtgatgcaaggacggcggggggcctgcagcagggtgaccgtatccacgggatggccaaagagaagcggacacaggctagcatccccctggaccgccagggtacactgggccatcttggcccacagacacggggcgacgcagggacaggactccgttacgacggaggagagccacagtgcgttggcggaatcgatgtggggcggcggggcgcaggactcgcagccccccgggtggttggtgatcctggccaggagccatcccagatggcgggccctgcttcccggtggacagagcgaccccaggtcgctgtccatggcccagcagtagatctggccgctggggaggtgccaccaggcccccgggcccaaggcgcagcacgcgcccggctccgggggggtcttcgcggggaccagatacgcgccatccagctcgccgaccactggctcctccgcgagctgttcggtggttgggtcgggggtttcctccgggggggtggccgcccgtatgcgtgcgaacgtgagggtgcacaggagcggggtcagggggtgcgtcacgctccggaggtggacgatcgcgcagtagcggcgctcgcggttaaagaaaaagagggcaaagaaggtgttcgggggcaaccgcagcgccttggggcgcgtcagatacagaaaaatctcgcagaagagggcgcgcccggggtctgggttaggaagggccacctgacacagaggctcggtgaggaccgttagacaccgaaagatcttgagccgctcgtccgcccgaacgacgcgccacacaaagacggagttgacaatgcgcgcgatagagtcgacgtccgtccccaggtcgtcgactctatcgcgcgtgccgcgagctccggcccgggaatccggccggggcaaggtccccgggggaccaggcggcgccaggggccgccggggtcccagctgcgccatgccgggggcggggggagggcaaaccccagaggcgggggccaacggcgcggggaggagtgggtgggcgaggtggccgggggaaggcgcccgctagcgagaccggccgttcccggacgacaccttgcgacaaaacctaaggacagcggcccgcgcgacggggtccgagaggctaaggtaggccgcgatgttaatggtgaacgcaaagccgccgggaaagacaactatgccacagaggcggcgattaaaccccaggcagaggtaggcgtagctttccccgggcaggtattgctcgcagaccctgcgtggggctgtggaggggacggcctccatgaagcgacatttactctgctcgcgtttactgacgtcaccatccatcgccacggcgattggacgattgttaagccgcagcgtgtctccgcttgtgctgtagtagtcaaaaacgtaatggccgtcggagtcggcaaagcgggccgggaggtcgtcgccgagcgggacgacccgccgcccccgaccgccccgtccccccaggtgtgccaggacggccagggcatacgcggtgtgaaaaaaggcgtcgggggcggtcccctcgacggcgcgcatcaggttctcgaggagaatggggaagcgcctggtcacctcccccaaccacgcgcgttggtcggggccaaagtcatagcgcaggcgctgtgagattcgcgggccgccctgaagcgcggcccggatggcctggcccagggcccggaggcacgccagatgtatgcgcgcggtaaaggcgacctcggcggcgatgtcaaagggcggcaggacggggcgcgggtggcgcaggggcacctcgagcgcgggaaagcgtagcagcagctccgcctgcccagcgggagacagctggtgggggcgcacgacgcgttctgcggcgcaggcctcggtcagggccgtggccagcgccgaggacagcagcggagggcgggcgcgtcgcccgccccacgccacggagttctcgtaggagacgacgacgaagcgctgcttggttccgtagtggtggcgcaggaccacggagatagaacgacggctccacagccagtccggccggtcgccgccggccagggcttcccatccgcgatccaaccactcgaccagcgaccgcggctttgcggtaccaggggtaagggttagaacgtcgttcaggatgtcctcgcccccgggcccgtggggcgctggggccacaaagcggcccccgccggggggctccagacccgccagcaccgcatctgcgtcagccgcccccatggcgcccccgctgacggcctggtgaaccagggcgccctggcgtagccccgatgcaacgccacaggccgcacgcccggtccgcgctcggaccgggtggcggcgggtgacgtcctgcactgcccgctgaaccaacgcgaggatctcctcgttctcctgtgcgatggacacgtcctgggccgcggtcgtgtcgccgccgggggccgtcagctgctcctccggggagatgggggggtcggacgccccgacgatgggcgggtctgcgggcgcccccgcgtggggccgggccaagggctgcggacgcggggacgcgctttcccccagacccatggacaggtgggccgcagcctccttcgcggccggcggggcggcggcgccaagcagagcgacgtagcggcacaaatgccgacagacgcgcatgatgcgcgtgctgtcggccgcgtagcgcgtgttgggggggacgagctcgtcgtaactaaacagaatcacgcgggcacagctcgcccccgagccccacgcaaggcgcagcgccgccacggcgtacgggtcatagacgccctgcgcgtcacacaccacgggcagggagacgaacaaccccccggcgctggacgcacgcggaaggaggccagggtgtgccggcacgacgggggccagaagctcccccaccgcatccgcgggcacgtaggcggcaaacgccgtgcaccacggggtacagtcgccggtggcatgagcccgagtctggatttcgacctggaagtttgcggccgtcccgagtccggggcggccgcgcatcagggcggccagagggattcccgcggccgccaggcactcgctggatatgatgacgtgaaccaaagaccgagggccgacccgggccgtggccgagatcgtctggacctcgttggccaagtgcgcgttcatggttcgggggtgggtgtgggtgtgtaggcgatgcgggtcccccgagtccgcgggaagggcgtgggtttggcgcgcgtatgcgtattcgccaacggaggcgtgcgtgcttatgcgcggcgcgtttcttctgtctctagggaatccgaggccaggactttaacctgctctttgtcgacgaggccaactttattcgcccggatgcggtccagacgattatgggctttctcaaccaggccaactgcaagattatcttcgtgtcgtccaccaacaccgggaaggccagtacgagctttttgtacaacctccgcggggccgcagacgagcttctcaacgtggtgacctatatatgcgatgatcacatgccgagggtggtgacgcacacaaacgccacggcctgttcttgttatatcctcaacaagcccgttttcatcacgatggacggggcggttcgccggaccgccgatttgtttctggccgattccttcatgcaggagatcatcgggggccaggccagggagaccggcgacgaccggcccgttctgaccaagtctgcgggggagcggtttctgttgtaccgcccctcgaccaccaccaacagcggcctcatggcccccgatttgtacgtgtacgtggatcccgcgttcacggccaacacccgagcctccgggaccggcgtcgctgtcgtcgggcggtaccgcgacgattatatcatcttcgccctggagcacttttttctccgcgcgctcacgggctcggcccccgccgacatcgcccgctgcgtcgtccacagtctgacgcaggtcctggccctgcatcccggggcgtttcgcggcgtccgggtggcggtcgagggaaatagcagccaggactcggccgtcgccatcgccacgcacgtgcacacagagatgcaccgcctactggcctcggagggggccgacgcgggctcgggccccgagcttctcttctaccactgcgagcctcccgggagcgcggtgctgtacccctttttcctgctcaacaaacagaagacgcccgcctttgaacactttattaaaaagtttaactccgggggcgtcatggcctcccaggagatcgtttccgcgacggtgcgcctgcagaccgacccggtcgagtatctgctcgagcagctaaataacctcaccgaaaccgtctcccccaacactgacgtccgtacgtattccggaaaacggaacggcgcctcggatgaccttatggtcgccgtcattatggccatctacctcgcggcccaggccggacctccgcacacattcgctcctatcacacgcgtctcgtgagcgcccaataaacacacccaggtatgctacgcacgaccacggtgtcgtctgttaaggggggggggggaagggggtgttggcgggaagcgtgggaacacgggggattctctcacgaccggcaccagtaccacccccctgtgaacacagaaaccccaacccaaatcccataaacatacgacacacaggcatattttggaatttcttaggtttttatttatttaggtatgctggggtttctccctggatgcccacccccacccccccgtgggtctagccgggccttagggatagcgtataacgggggccatgtctccggaccgcacaacggccgcgccgtcaaaggtgcacacccgaaccacgggagccagggccaaggtgtctcctagttggcccgcgtgggtcagccaggcgacgagcgcctcgtaaagcggcagccttcgctctccatcctgcatcagggccggggcttcggggtgaatgagctgggcggcctcccgcgtgacactctgcatctgcagtagagcgttcacgtacccgtcctgggcacttagcgcaaagagccgggggattagcgtaaggatgatggtggttccctccgtgatcgagtaaaccatgttaaggaccagcgatcgcagctcggcgtttacgggaccgagttgttggacgtccgccagcagcgagaggcgactcccgttgtagtacagcacgttgaggtctggcagccctccggggtttctggggctggggttcaggtcccggatgcccctggccacgagccgcgccacgatttcgcgcgccaggggcgatggaagcggaacgggaaaccgcaacgtgaggtccagcgaatccaggcgcacgtccgtcgcttggccctcgaacacgggcgggacgaggctgatggggtccccgttacagagatctacgggggaggtgttgcgaaggttaacggtgccggcgtgggtgaggcccacgtccagggggcaggcgacgattcgcgtgggaagcacccgggtgatgaccgcggggaagcgccttcggtacgccagcaacaaccccaacgtgtcgggactgacgcctccggagacgaaggattcgtgcgccacgtcggccagcgtcagttgccggcggatggtcggcaggaataccacccgcccttcgcagcgctgcagcgccgccgcatcggggcgcgagatgcccgagggtatcgcgatgtcagtttcaaagccgtccgccagcatggcgccgatccacgcggcagggagtgcagtggtggttcgggtggcgggaggagcgcggtgggggtcagcggcgtagcagagacgggcgaccaacctcgcataggacggggggtgggtcttagggggttgggaggcgacagggaccccagagcatgcgcggggaggtctgtcgggcccagacgcaccgagagcgaatccgtccgcggagtcccggcttgggttttatggggcccggccctcggaatcgcggcttgtcggcggggacaaagggggcggggctaggggcttgcggaaacagaagacgcgtgggataaaagaatcgcactaccccaaggaagggcggggcggtttattacagagccagtcccttgagcggggatgcgtcatagacgagatactgcgcgaagtgggtctcccgcgcgtgggcttccccgttgcgggcactgcggaggagggcggggtcgctggcgcaggtgagcgggtaggcctcctgaaacaggccacacgggtcctccacgagttcgcggcaccccggggggcgcttaaactgtacgtcgctggcggcggtggccgtggacaccgccgaacccgtctccacgatcaggcgctccaggcagcgatgtttggcggcgatgtcggccgacgtaaagaacttaaagcaggggctgagcaccggcgaggccccgttgaggtggtaggccccgttatagagcaggtccccgtacgaaaatcgctgcgacgcccacgggttggccgtggccgcgaaggcccgggacgggtcgctctggccgtggtcgtacatgagggcggtgacatccccctccttgtcccccgcgtaaacgcccccggcggcgcgtccccgggggttgcagggccggcggaagtagttgacgtcggtcgacacgggggtggcgataaactcacacacggcgtcctggccgtggtccatccctgcgcgccgcggcacctgggcgcacccgaacacggggacgggctgggccggccccaggcggtttcccgccacgaccgcgttccgcaggtacacggctgccgcgttgtccaggagagggggagccccgcggcccaggtaaaagttttggggaaggttgcccatgtcggtgacggggttgcggacggttgccgtggccacgacggcggtgtagcccacgcccaggtccacgttcgcgcgcggctgggtgagcgtgaagtttacccccccgccagtttcgtgccgggccacctggagctggcccaggaagtacgcctccgacgcgcgctccgagaacagcacgttctcagtcacaaagcggtcctgtcggacgacggtgaacccaaacccgggatggaggcccgtcttgagctgatgatgcaaggccacgggactgatcttgaagtaccccgccatgagcgcgtaggtcagcgcgttctccccggccgcgctctcgcggacgtgctgcacgacgggctgtcggatcgacgaaaagtagttggcccccagagccggggggaccagggggacctgccgcgacaggtcgcgcagggccggggggaaattgggcgcgttcgccacgtggtcggccccggcgaacagcgcgtggacggggagggggtaaaaatagtcgccattttggatggtatggtccagatgctggggggccatcagcaggattccggcgtgcaacgccccgtcgaatatgcgcatgttggtggtggacgcggtgttggcgcccgcgtcgggcgccgccgagcagagcagcgccgttgtgcgttcggccatgttgtgggccagcacctgcagcgtgagcatggcgggcccgtccactaccacgcgcccgttgtgaaacatggcgttgaccgtgttggccaccagattggccgggtgcagggggtgcgcggggtccgtcacggggtcgctggggcactcctcgccgggggcgatctccgggaccaccatgttctgcagggtggcgtatacgcggtcgaagcgaacccccgcggtgcagcagcggccccgcgagaaggcgggcaccatcacgtagtagtaaatcttgtggtgcacggtccagtccgccccccggtgcggccggtcatccgcggcgtccgcggctcgggcctgggtgttgtgcagcagctggccgtcgttgcggttgaagtccgcggtcgccacgttacatgccgccgcgtacacggggtcgtggccccccgcgctaacccggcagtcgcgatggcggtccagggccgcgcgccgcatcagggcgtcacagtcccacacgaggggtggcagcagcgccgggtctcgcattaggtgattcagctcggcttgcgcctgcccgcccagctccgggccggtcagggtaaagtcatcaaccagctgggccagggcctcgacgtgcgccaccaggtcccggtacacggccatgcactcctcgggaaggtctcccccgaggtaggtcacgacgtacgagaccagcgagtagtcgttcacgaacgccgcgcaccgcgtgttgttccagtagctggtgatgcactggaccacgagccgggccagggcgcagaagacgtgctcgctgccgtgtatggcggcctgcagcaggtaaaacaccgccgggtagttgcggtcgtcgaacgccccgcgaacggcggcgatggtggcgggggccatggcgtggcgtcccacccccagctccaggccccgggcgtcccggaacgccgccggacatagcgccaggggcaagttgccgttcaccacgcgccaggtggcctggatctcccccgggccggccgggggaacgtccccccccggcagctccacgtcggccacccccacaaagaagtcgaacgcggggtgcagctcaagagccaggttggcgttgtcgggctgcataaactgctccggggtcatctggccttccgcgacccatcggacccgcccgtgggccaggcgctgcccccaggcgttcaaaaacagctgctgcatgtctgcggcggggccggccggggccgccacgtacgccccgtacggattggcggcttcgacggggtcgcggttaaggcccccgaccgccgcgtcaacgttcatcagcgaagggtggcacacggtcccgatcgcgtgttccagagacaggcgcagcacctggcggtccttcccccaaaaaaacagctggcggggcgggaaggcgcggggatccgggtggccgggggcggggactaggtccccggcgtgcgcggcaaaccgttccatgaccggattgaacaggcccaggggcaggacgaacgtcaggtccatggcgcccaccagggggtagggaacgttggtggcggcgtagatgcgcttctccagggcctccagaaagaccagcttctcgccgatggacaccagatccgcgcgcacgcgcgtcgtctggggggcgctctcgagctcgtccagcgtctgccggttcaggtcgagctgctcctcctgcatctccagcaggtggcggcccacgtcgtccagacttcgcacggccttgcccatcacgagcgccgtgaccaggttggccccgttcaggaccatctcgccgtacgtcaccggcacgtcggcttcggtgtcctccactttcaggaaggactgcaggaggcgctgtttgatcggggcggtggtgacgagcaccccgtcgaccggccgcccgcgcgtgtcggcatgcgtcagacggggcacggccacggagggctgcgtggccgtggtgaggtccacgagccaggcctcgacggcctcccggcggtggcccgccttgcccaggaaaaagctcgtctcgcagaagcttcgctttagctcggcgaccagggtcgcccgggccaccctggtggccaggcggccgttgtccaggtatcgttgcatcggcaacaacaaagccaggggcggcgccttttccagcagcacgtgcagcatctggtcggccgtgccgcgctcaaacgccccgaggacggcctggacgttgcgagcgagctgttggatggcgcgcaactggcgatgcgcgccgatacccgtcccgtccagggcctcccccgtgagcagggcgatggcctcggtggccaggctgaaggcggcgttcagggcccggcggtcgataatcttggtcatgtaattgtgtgtgggttgctcgatggggtgcgggccgtcgcgggcaatcagcggctggtggacctcgaactgtacgcgcccctcgttcatgtaggccagctccggaaacttggtacacacgcacgccaccgacaacccgagctccagaaagcgcacgagcgacagggtgttgcaatacgaccccagcagggcgtcgaactcgacgtcgtacaggctgtttgcatcggagcgcacgcgggaaaaaaaatcaaacaggcgtcgatgcgacgccacctcgatcgtgctaaggagggacccggtcggcaccatggccgcggcataccggtatcccggagggtcgcggttgggagcggccatggggtcgcgtggagatcggctgtctctagcgatattggcccggggaggctaagatccaccccaacgcccggccacccgtgtacgtgcccgacggcccaaggtccaccgaaagacacgacgggcccggacccaaaaaggcgggggatgctgtgtgagaggccgggtgccggtcgggggggaaaggcaccgggagaaggctgcggcctcgttccaggagaacccagtgtccccaacagacccggggacgtgggatcccaggccttatatacccccccccccgccccacccccgttagaacgcgacgggtgcattcaagatggccctggtccaaaagcgtgccaggaagaaattggcagaggcggcaaagctgtccgccgccgccacccacatcgaggccccggccgcgcaggctatccccagggcccgtgtgcgcaggggatcggtgggcggcagcatttggttggtggcgataaagtggaaaagcccgtccggactgaaggtctcgtgggcggcggcgaacaaggcacacagggccgtgcctcccaaaaacacggacatcccccaaaacacgggcgccgacaacggcagacgatccctcttgatgttaacgtacaggaggagcgcccgcaccgcccacgtaacgtagtagccgacgatggcggccaggatacaggccggcgccaccacccttccggtcagcccgtaatacatgcccgctgccaccatctccaacggcttcaggaccaaaaacgaccaaaggaacagaatcacgcgctttgaaaagaccggctgggtatggggcggaagacgcgagtatgccgaactgacaaaaaaatcagaggtgccgtacgaggacaatgaaaactgttcctccagcggcagttctccctcctcccccccgaaggcggcctcgtcgaccagatctcgatccaccagaggaaggtcatcccgcatggtcatggggtgtgcggtggaggtggggagaccgaaaccgcaaagggtcgcttacgtcagcaggatcccgagatcaaagacacccgggttcttgcacaaacaccacccgggttgcatccgcggaggcgagtgttttgataaggccgttccgcgccttgatataacctttgatgttgaccacaaaacccggaatttacgcctacgccccaatgcccacgcaagatgaggtaggtaacccccccgtgggtgtgacgttgcgtttagttcattggaggccaaggggaaaaatggggtggggaggaaacggaaaacccagtaggccgtgtcgggaacacgcccggggttgtcctcaaaaggcagggtccatactacggaagccgtcgttgtattcgagacctgcctgtgcaacgcacgtcggggttgcctgtgtccggttcggcccccaccgcgtgcggcacgcacgaggacgagtccgcgtgctttattggcgttccaagcgttgccctccagtttctgttgtcggtgttcccccatacccacgcccacatccaccgtagggggcctctgggccgtgttacgtcgccgcccgcgatggagcttagctacgccaccaccatgcactaccgggacgttgtgttttacgtcacaacggaccgaaaccgggcctactttgtgtgcggggggtgtgtttattccgtggggcggccgtgtgcctcgcagcccggggagattgccaagtttggtctggtcgttcgagggacaggcccagacgaccgcgtggtcgccaactatgtacgaagcgagctccg

SEQ ID NO: 844 - DNA, 32767 bp, synthetic construct; identical to SEQ ID NO: 843
  source 1..32767: mol_type = other DNA

SEQ ID NO: 845 - DNA, 32767 bp, synthetic construct; identical to SEQ ID NO: 843
  source 1..32767: mol_type = other DNA

SEQ ID NO: 846 - DNA, 32767 bp, synthetic construct; identical to SEQ ID NO: 843
  source 1..32767: mol_type = other DNA

SEQ ID NO: 847 - DNA, 32767 bp, synthetic construct; identical to SEQ ID NO: 843
  source 1..32767: mol_type = other DNA

SEQ ID NO: 848 - DNA, 32767 bp, synthetic construct; identical to SEQ ID NO: 843
  source 1..32767: mol_type = other DNA

SEQ ID NO: 849 - DNA, 32767 bp, synthetic construct
  source 1..32767: mol_type = other DNA
aaaaaagctgaacgagaaacgtaaaatgatataaatatcaatatattaaattagattttgcataaaaaacagactacataatactgtaaaacacaacatatccagtcactatgaatcaactacttagatggtattagtgacctgtagtcgaccgacagccttccaaatgttcttcgggtgatgctgccaacttagtcgaccgacagccttccaaatgttcttctcaaacggaatcgtcgtatccagcctactcgctattgtcctcaatgccgtattaaatcataaaaagaaataagaaaaagaggtgcgagcctcttttttgtgtgacaaaataaaaacatctacctattcatatacgctagtgtcatagtcctgaaaatcatctgcatcaagaacaatttcacaactcttatacttttctcttacaagtcgttcggcttcatctggattttcagcctctatacttactaaacgtgataaagtttctgtaatttctactgtatcgacctgcagactggctgtgtataagggagcctgacatttatattccccagaacatcaggttaatggcgtttttgatgtcattttcgcggtggctgagatcagccacttcttccccgataacggagaccggcacactggccatatcggtggtcatcatgcgccagctttcatccccgatatgcaccaccgggtaaagttcacgggagactttatctgacagcagacgtgcactggccagggggatcaccatccgtcgcccgggcgtgtcaataatatcactctgtacatccacaaacagacgataacggctctctcttttataggtgtaaaccttaaactgcatttcaccagcccctgttctcgtcagcaaaagagccgttcatttcaataaaccgggcgacctcagccatcccttcctgattttccgctttccagcgttcggcacgcagacgacgggcttcattctgcatggttgtgcttaccagaccggagatattgacatcatatatgccttgagcaactgatagctgtcgctgtcaactgtcactgtaatacgctgcttcatagcatacctctttttgacatacttcgggtatacatatcagtatatattcttataccgcaaaaatcagcgcgcaaatacgcatactgttatctggcttttagtaagccggatccacgcggcgtttacgccccccctgccactcatcgcagtactgttgtaattcattaagcattctgccgacatggaagccatcacaaacggcatgatgaacctgaatcgccagcggcatcagcaccttgtcgccttgcgtataatatttgcccatggtgaaaacgggggcgaagaagttgtccatattggccacgtttaaaaaggccgtaatatccagctgaacggtctggttataggtacattgagcaactgactgaaatgcctcaaaatgttctttacgatgccattgggatatatcaacggtggtatatccagtgatttttttctccattttagcttccttagctcctgaaaatctcgataactcaaaaaatacgcccggtagtgatcttatttcattatggtgaaagttggaacctcttacgtgccgatcaacgtctcattttcgccaaaagttggcccagggcttcccggtatcaacagggacaccaggatttatttattctgcgaagtgatcttccgtcacaggtatttattcggcgcaaagtgcgtcgggtgatgctgccaacttagtcgactacaggtcactaataccatctaagtagttgattcatagtgactggatatgttgtgttttacagtattatgtagtctgttttttatgcaaaatctaatttaatatattgatatttatatcattttacgtttctcgttcagctttcttgtacaaagtggttttaatggaccgcccgcaagggggggggggcatttcagtgtcgggtgacgagcgcgatccggccgggatcctaggaccccaaaagtttgtctgcgtattccagggcggggctcagttgaatctcccgcagcacctctaccagcaggtccgcggtgggctggagaaactcggccgtcccggggcaggcggttgtcgggggtggaggcgcggcgcccaccccgtgtgccgcgcctggcgtctcctctgggggcgacccgtaaatggttgcagtgatgtaaatggtgtccgcggtccagaccacggtcaaaatgccggccgtggcgctccgggcgctttcgccgcgcgaggagctgacccaggagtcgaacggatacgcgtacatatgggcgtcccacccgcgttcgagcttctggttgctgtcccggcctataaagcggtaggcacaaaattcggcgcgacagtcgataatcaccaacagcccaatgggggtgtgctggataacaacgcctccgcgcggcaggcggtcctggcgctcccggccccgtaccatgatcgcgcgggtgccgtactcaaaaacatgcaccacctgcgcggcgtcgggcagtgcgctggtcagcgaggccctggcgtggcataggctatacgcgatggtcgtctgtggattggacatctcgcggtgggtagtgagtcccccgggccgggttcggtggaactgtaaggggacggcgggttaatagacaatgaccacgttcggatcgcgcagagccgatagtatgtgctcactaatgacgtcatcgcgctcgtggcgctcccggagcggatttaagttcatgcgaaggaattcggaggaggtggtgcgggacatggccacgtacgcgctgttgaggcgcaggttgccgggcgtaaagcagatggcgaccttgtccaggctaaggccctgggagcgcgtgatggtcatggcaagcttggagctgatgccgtagtcggcgtttatggccatggccagctccgtagagtcaatggactcgacaaactcgctgatgttggtgttgacgacggacatgaagccgtgttggtcccgcaagaccacgtaaggcaggggggcctcttccagtaactcggccacgttggccgtcgcgtgccgcctccgcagctcgtccgcaaaggcaaacacccgtgcgtacgtgtatcccatgagcgtataattgtccgtctgcagggcgacggacatcagccccccgcgcggcgagccggtcagcatctcgcagccccggaagataacgttgtccacgtacgtgctaaagggggcgacttcaaatgcctccccgaagagctcttggaggattcggaatctcccgaggaaggcccgcttcagcagcgcaaactgggtgtgaacggcggcggtggtctccggttccccgggggtgtagtggcagtaaaacacgtcgagctgttgttcgtccagccccgcgaaaataacgtcgaggtcgtcgtcgggaaaatcgtccgggcccccgtcccgcggccccagttgcttaaaatcaaacgcacgctcgccgggggcgcctgcgtcggccattaccgacgcctgcgtcggcacccccgaagatttggggcgcagagacagaatctccgccgttagttctcccatgcgggcgtaggcgagggtcctctgggtcgcatccaggcccgggcgctgcagaaagttgtaaaaggagataagcccgctaaatatgagccgcgacaggaacctgtaggcaaactccaccgaagtctccccctgagtctttacaaagctgtcgtcacgcaacactgcctcgaaggcccggaacgtcccactaaacccaaaaaccagttttcgcaggcgcgcggtcaccgcgatctggctgttgaggacgtaagtgacgtcgttgcgggccacgaccagctgctgtttgctgtgcacctcgcagcgcatgtgccccgcgtcctggtcctggctctgcgagtagttggtgatgcggctggcgttggccgtgagccacttttcaatcgtcaggccgggctggtgtgtcagccgtcggtattcgtcaaactccttgaccgacacgaacgtaagcacggggagggtgaacacgacgaactccccctcacgggtcaccttcaggtaggcgtggagcttggccatgtacgcgctcacctctttgtgggaggagaacagccgcgtccagccggggaggttggcggggttggtgatgtagttttccgggacgacgaagcgatccacgaactgcatgtgctcctcggtgatgggcaggccgtactccagcaccttcatgaggttaccgaactcgtgctcgacgcaccgtttgttgttaataaaaatggcccagctatacgagaggcgggcgtactcgcgcagcgtgcggttgcagatgaggtacgtgagcacgttctcgctctggcggacggaacaccgcagtttctggtgctcgaaggtcgactccagggacgccgtctgcgtcggcgagcccacacacaccaacacgggccgcaggcgggccgcgtactggggggtgtggtacagggcgttaatcatccaccagcaatacaccacggccgtgaggaggtgacgcccaaggagcccggcctcgtcgatgacgatcacgttgctgcgggtaaaggccggcagcgccccgtgggtggccggggccaaccgcgtcagggcgccctcggccaaccccagggtccgttccagggcggccagggcgcgaaactcgttccgcaactcctcgcccccggaggcggccagggcgcgcttcgtgaggtccaaaatcacctcccagtagtacgtcagatctcgtcgctgcaggtcctccagcgaggcggggttgctggtcagggtgtacgggtactgtcccagttgggcctggacgtgattcccgcgaaacccaaattcatgaaagatggtgttgatgggtcggctgagaaaggcgcccgagagtttggcgtacatgttttgggccgcaatgcgcgtggcgcccgtcaccacacagtccaagacctcgttgattgtctgcacgcacgtgctctttccggagccagcgttgccggtgataagatacaccgcgaacggaaactccctgaggggcaggcctgcgggggactctaaggccgccacgtcccggaaccactgcagatggggcacttgcgctccgtcgagctgttgttgcgagagctctcggatgcgcttaaggattggctgcaccccgtgcatagacgtaaaatttaaaaaggcctcggccctccctggaacggctggtcggtccccgggttgctgaaggtgcggcgggccgggtttctgtccgtctagctggcgctccccgccggccgccgccatgaccgcaccacgctcgcgggcccccactacgcgtgcgcggggggacacggaagcgctgtgctcccccgaggacggctgggtaaaggttcaccccagccccggtacgatgctgttccgcgagattctccacgggcagctggggtataccgagggccagggggtgtacaacgtcgtccggtccagcgaggcgaccacccggcagctgcaggcggcgatctttcacgcgctcctcaacgccaccacttaccgggacctcgaggcggactggctcggccacgtggcggcccgcggtctgcagccccaacggctggttcgccggtacaggaacgcccgggaggcggatatcgccggggtggccgagcgggtgttcgacacgtggcggaacacgcttaggacgacgctgctggactttgcccacgggttggtcgcctgctttgcgccgggcggcccgagcggcccgtcaagcttccccaaatatatcgactggctgacgtgcctggggctggtccccatattacgcaagcgacaagaagggggtgtgacgcagggtctgagggcgtttctcaagcagcacccgctgacccgccagctggccacggtcgcggaggccgcggagcgcgccggccccgggttttttgagctggcgctggccttcgactccacgcgcgtggcggactacgaccgcgtgtatatctactacaaccaccgccggggcgactggctcgtgcgagaccccatcagcgggcagcgcggagaatgtctggtgctgtggccccccttgtggaccggggaccgtctggtcttcgattcgcccgtccagcggctgtttcccgagatcgtcgcgtgtcactccctccgggaacacgcgcacgtctgccggctgcgcaataccgcgtccgtcaaggtgctgctggggcgcaagagcgacagcgagcgcggggtggccggtgccgcgcgggtcgttaacaaggtgttgggggaggacgacgagaccaaggccgggtcggccgcctcgcgcctcgtgcggcttatcatcaacatgaagggcatgcgccacgtaggcgacattaacgacaccgtgcgttcctacctcgacgaggccggggggcacctgatagacgccccggccgtcgacggtaccctccctggattcggcaagggcggaaacagccgcgggtctgcgggccaggaccagggggggcgggcgccgcagcttcgccaggccttccgcacggccgtggttaacaacatcaacggcgtgttggagggctatataaataacctgtttggaaccatcgagcgcctgcgcgagaccaacgcgggcctggcgacccaattgcaggagcgcgaccgcgagctccggcgcgcaacagcgggggccctggagcgccagcagcgcgcggccgacctggcggccgagtccgtgaccggtggatgcggcagccgccctgcgggggcggacctgctccgggccgactatgacattatcgacgtcagcaagtccatggacgacgacacgtacgtcgccaacagctttcagcacccgtacatcccttcgtacgcccaggacctggagcgcctgtcgcgcctctgggagcacgagctggtgcgctgttttaaaattctgtgtcaccgcaacaaccagggccaagagacgtcgatctcgtactccagcggggcgatcgccgcattcgtcgccccctactttgagtcagtgcttcgggccccccgggtaggcgcgcccatcacgggctccgatgtcatcctgggggaggaggagttatgggatgcggtgtttaagaaaacccgcctgcaaacgtacctgacagacatcgcggccctgttcgtcgcggacgtccagcacgcagcgctgcccccgcccccctccccggtcggcgccgatttccggcccggcgcgtccccgcggggccggtccagatcgcggtcgcccggaagaactgcgcgaggcgcgccggaccagggcgggggcatcgggcaccgggatggccgccgcgacggccgacgatgaggggtcggccgccaccatcctcaagcaggccatcgccggggaccgcagcctggtcgaggcggccgaggcgattagccagcagacgctgctccgcctggcctgcgaggtgcgccaggtcggcgaccgccagccgcggtttaccgccaccagcatcgcgcgcgtcgacgtcgcgcctgggtgccggttgcggttcgttctggacgggagtcccgaggacgcctatgtgacgtcggaggattactttaagcgctgctgcggccagtccagttatcgcggcttcgcggtggcggtcctgacggccaacgaggaccacgtgcacagcctggccgtgccccccctcgttctgctgcaccggttctccctgttcaaccccagggacctcctggactttgagcttgcctgtctgctgatgtacctggagaactgcccccgaagccacgccaccccgtcgacctttgccaaggttctggcgtggctcggggtcgcgggtcgccgcacgtccccattcgaacgcgttcgctgccttttcctccgcagttgccactgggtcctaaacacactcatgttcatggtgtacgtaaaaccgttcgacgacgagttcgtcctgccccactggtacatggcccggtacctgctggccaacaacccgccccccgttctctcggccctgttctgtgccaccccgacgagctcctcattccggctgccggggccgcccccccgctccgactgcgtggcctataaccccgccgggatcatggggagctgctgggcgtcggaggaggtgcgcgcgcctctggtctattggtggctttcggagaccccaaaacgacagacgtcgtcgctgttttatcagttttgttgaattttaggaaataaacccggttttgtttctgtggcctcccgacggatgcgcgtgtccttcctccgtcttggtgggtgggtgtctgtgtatcgcgtcccatctgtgcggagagggggggcatgtcggcacgtattcggacagactcaagcacacacgggggagcgctcttgtctcagggcaatgtttttattggtcaaacttggttattgcttaagaatacgcgtagttgatcgtaccgtgagtaataatgtgactgtactgcatcaggaactgattggaattctcgtaccgtgagtaataatgtgggggtactgcatcaggaactgattggaatagttattgcttaagaatacgcgtagtaattactgcatcaggaactgattggatttatcgtaccgtgagtaataatgtggcggttattgcttaagaatacgcgtaggctttcgtaccgtgagtaataatgtggtcgtactgcatcaggaactgattggaagtcttattgcttaagaatacgcgtagcatatcaggcaaacagaaacgacatcttgtcgtcaaagggatacacaaacttccccccctctccccatactcccgccagcaccccggtaaacaccaactcaatctcgcgcaggatttcgcgcaggtgatgagcgcagtccacgggggggagcacaaggggccgcgggtatagatcgacggggacgccgaccgactccccgcctccgggacagacacgcacgacgcgccgccagtagtgctctgcgtccagcaaggcgccgccgcggaaggcagtggggggcaaggggtcgctggcctcaaagggggacacccgaacgctccagtactccgcgtccaaccgtttattaaacgcgtccaagataaggcggtcgcaggcgtcctccataaggccccgggccgtgagtgcgtcctcctccggcacgcatgccgttgtcaggcccaggacccgtcgcagcgtgtcgcgtacgacccctgccgccgtggtgtacgcgggcccgcggagaggaaatcccccaagatggtcagtgttgtcgcgggagttccagaaccacactcccgcctggctccaggcgactgcgtgggtgtagacgccctcgagggccaggcacagtgggtgccgcagccggacggcgttggccctaagcacggctcccacggccgtctcgatggcccgccgggcgtcctcgatcaccccggaagccgcatccgcgtcttgggggtccacgttaaagacaccccagaacgcacccccatcgcccccgcagaccgcgaacttcaccgagctggccgtctcctcgatctgcaggcagacggcggccattaccccacccaggagctgccgcagcgcagggcaggcgttgcacgtgtccgggaccaggcgctccaagacggccccggcccagggctctgagggagcggccaccaccagcgcgtccagtcttgctaggcccgtccggccgtgggggtccgccagcccgctccccccgaggtcggccagggccgccaggagctgggcgcgaagtccggggaagcaaaaccgcgccgtccagacgggcccgacggccgcgggcgggtctaacagttggatgattttagtggcgggatgccaccgcgccaccgcctcccgcaccgcgggcaggaggcatccggctgccgccgaggccacgccgggccaggctcgcggggggaggacgaccctggcccccaccgcgggccaggcccccaggagcgcggcgtaagcggccgcggccccgcgcaccaggtcccgtgccgactcggccgtggccggcacggtgaacgtgggccaacccggaaaccccaggacggcaaagtacgggacgggtcccccccggacctcaaactcgggccccagaaaggcaaagacgggggccagggccccgggggcggcgtggaccgtggtatgccactgccggaaaagggcgacgagcgccggcgcggagaacttctcgccggcgcttacaaagtagtcgtaatcgcggggcagcagcacccgtgccgtgactcgttgcgggtgcccgcgtggccgcaggcccacctcgcacacctcgaccaggtccccgaacgcgccctccttcttgatcggcggaaacgcaagagtctggtattcgcgcgcaaatagcgcggttccggtggtgatgttaacggtcagcgaagcggcggacgcgcactggggggtgtcgcgaatggccgccaggcgcgcccacgccagccgcgcgtcgggatgctcggcaacgcgcgccgccagggccatagggtcgatgtcaatgttggcctccgcgaccaggagagcggcgcgaggggcggcgggcgggccccacgacgctctctcaactttcaccaccagtcccgtgcgtgggtccgagccgatacgcagcggggcgaacagggccaccggcccggtctggcgctccagggccgccaggacgcacgcgtacagcgcccgccacagagtcgggttctccaggggctccagcggggaggcggccggcgtcgtcgcggcgcgggcggccgccacgacggcctggacggagacgtccgcggagccgtagaaatcccgcagctccgtcgcggtgacggagacctccgcaaagcgcgcgcgaccctcccctgcggcgttgcgacatacaaaatacaccagggcgtggaagtactcgcgagcgcgggggggcagccataccgcgtaaagggtaatggcgctgacgctctcctccacccacacgatatctgcggtgtccatcgcacggcccctaaggatcacgggcggtctgtgggtcccatgctgccgtgcctggccgggcccggtgggtcgcggaaaccggtgacggggggggggcggtttttggggttggggtgggggtgggaaacggcccgggtccgggggccaacttggcccctcggtgcgttccggcaacagcgccgccggtccgcggacgaccacgtaccgaacgagtgcggtcccgagacttatagggtgctaaagttcaccgccccctgcatcatgggccaggcctcggtggggagctccgacagcgccgcctccaggatgatgtcagcgttggggttggcgctggatgagtgcgtgcgcaaacagcgcccccacgcgggcacgcgtagcttgaagcgcgcgcccgcaaactcccgcttgtgggccataagcagggcgtacagctgcctgtgggtccggcaggcgctgtggtcgatgtggtgggcgtccaacaaccccacgattgtctgtttggtgaggtttttaacgcgccccgccccgggaaacgtctgcgtgcttttggccatctgcacgccaaacagttcgccccagattatcttgaacagcgccaccgcgtggtccgtctcgctaacggacccgcgcgggggacagccgcttagggcgtcggcgacgcgcttgacggcttcctccgagagcagaagtccgtcggttacgttacagtggcccagttcgaacaccagctgcatgtagcggtcgtagtggggggtcagtaggtccagcacgtcatcggggccgaaggtcctcccagatcccccggccgccgagtcccaatgcaggcgcgcggccatggtgctgcacaggcacaacagctcccagacgggggttacgttcagggtggggggcagggccacgagctccagctctccggtgacgttgatcgtggggatgacgcccgtggcgtagtggtcatagatccgccgaaatatggcgctgctgcgggtggccatgggaacgcggagacaggcctccagcaacgccaggtaaataaaccgcgtgcgtcccatcaggctgttgaggttgcgcatgagcgcgacaatttccgccggcgcgacatcggaccggaggtatttttcgacgaaaagacccacctcctccgtctcggcggcctgggccggcagcgacgcctcgggatcccggcaccgcagctcccgtagatcgcgctgggccctgagggcgtcgaaatgtacgccccgcaaaaacagacagaagtcctttggggtcagggtatcgtcgtgtccccagaagcgcacgcgtatgcagtttagggtcagcagcatgtgaaggatgttaaggctgtccgagagacacgccagcgtgcatctctcaaagtagtgtttgtaacggaatttgttgtagatgcgcgacccccgccccagcgacgtgtcgcatgccgacgcgtcacagcgccccttgaaccggcgacacagcaggtttgtgacctgggagaactgcgcgggccactggccgcaggaactgaccacgtgattaaggagcatgggcgtaaagacgggctccgagcgcgccccggagccgtccatgtaaatcagtagctcccccttgcggagggtgcgcacccgtcccagggactggtacacggacaccatgtccggtccgtagttcatgggtttcacgtaggcgaacatgccatcaaagtgcaggggatcgaagctgaggcccacggttacgaccgtcgtgtatataaccacgcggtattggccccacgtggtcacgtccccgaggggggtgagcgagtgaagcaacagcacgcggtccgtaaactgacggcagaaccgggccacgatctccgcgaaggagaccgtcgacgaaaaaatgcagatgttatcgcccccgccaaggcgcgcttccagctccccaaagaacgtggccccccgggcctccggagaggcgtccggagacgggccgctcggcggcccgggcgggcgcagggcagcctgcaggagctcggtccccagacgcgggagaaacaggcaccggcgcgccgaaaacccgggcatggcgtactcgccgaccaccacatgcacgtttttttcgccccggagaccgcacaggaagtccaccaactgcgcgttggcggttgcgtccatggcgatgatccgaggacagatgcgcagcaggcgtagcattaacgcatccacgcggcccagttgctgcatcgttggcgaatagagctggcccagcgtcgacataacctcgtccagaacgaggacgtcgtagttgttcagaaggttggggcccacgcgatgaaggctttccacctggacgataagtcggtggaaggggcggtcgttcataatgtaattggtggatgagaagtaggtgacaaagtcgaccaggcctgactcagcgaaccgcgtcgctagggtctgggtaaaactccgacgacaggagacgacgagcacactcgtgtccggagagtggatcgcttcccgcagccagcggatcagcgcggtagtttttcccgaccccattggcgcgcggaccacagtcacgcacctggccgtcggggcgctcgcgttggggaaggtgacgggtccgtgctgctgccgctcgatcgttgttttcgggtgaacccggggcacccattcggccaaatcccccccgtacaacatccgcgctagcgatacgctcgacgtgtactgttcgcactcgtcgtccccaatgggacgcccggcccccagaggatctcccgactccgcgccccccacgaaaggcatgaccggggcgcggacggcgtggtgggtctggtgtgtgcaggtggcgacgtttgtggtctctgcggtctgcgtcacggggctcctcgtcctggcctctgtgttccgggcacggtttccctgcttttacgccacggcgagctcttatgccggggtgaactccacggccgaggtgcgcgggggtgtagccgtgcccctcaggttggacacgcagagccttgtgggcacttatgtaatcacggccgtgttgttgttggccgtggccgtgtatgccgtggtcggcgccgtgacctcccgctacgaccgcgccctggacgcgggccgccgtctggctgcggcccgcatggccatgccgcacgccacgctgatcgccggaaacgtctgctcttggttgctgcagatcaccgtcctgttgctggcccatcgcatcagccagctggcccacctggtttacgtcctgcactttgcgtgtctggtgtattttgcggcccatttttgcaccaggggggtcctgagcgggacgtatctgcgtcaggtgcacggcctgatggagctggccccgacccatcatcgcgtcgtcggcccggctcgcgccgtgctgacaaacgccttgctgttgggcgtcttcctgtgcacggccgacgccgcggtatccctgaataccatcgccgcgttcaactttaatttttcggccccgggcatgctcatctgcctgaccgtgctgttcgccattctcgtcgtatcgctgttgttggtggtcgagggggtgttgtgtcactacgtgcgcgtgttggtgggcccccacctgggggccgtggccgccacgggcatcgtcggcctggcctgcgagcactattacaccaacggctactacgttgtggagacgcagtggccgggggctcagacgggagtccgcgtcgccctcgccctggtcgccgcctttgccctcggcatggccgtgctccgctgcacccgcgcctatctgtatcacaggcggcaccacaccaaattttttatgcgcatgcgcgacacgcgacaccgcgcacattccgccctcaagcgcgtacgcagttccatgcgcggatcgcgagacggccgccacaggcccgcacccggcagcccgcccgggattcccgaatatgcggaagacccctacgcgatctcatacggcggccagctcgaccggtacggagattccgacggggagccgatttacgacgaggtggcggacgaccaaaccgacgtattgtacgccaagatacaacacccgcggcacctgcccgacgacgatcccatctatgacaccgttggggggtacgaccccgagcccgccgaggaccccgtgtacagcaccgtccgccgttggtagctgtttggttccgttttaataaaccgtttgtgtttaacccgaccgtggtgtatgtctggtgtgtggcgtccgatcccgttactatcaccgtccccccccccccctcaaccccggcgattgtgggttttttaaaaacgacacgcgtgcgaccgtatacagaacattgttttggtttttattcgctatcggacatggggggtggaaactgggtggcggggcaggcgcctccgggggtccgccggtgagtgtggcgcgagggggggtccgatgaacgcaggcgctgtctccccggggcccgcgtaaccccgcgcatatccgggggcacgtagaaattaccttcctcttcggactcgatatccacgacgtcaaagtcgtgggcggtcagcgagacgacctccccgtcgtcggtgatgaggacgttgtttcggcagcagcagggccgggccccggagaacgagaggcccatagctcggcgagcgtgtcgtcgaatgccaggcggctgcttcgctggatggccttatagatctccggatcgatgcggacgggggtaatgatcagggcgatcggaacggcctggttcgggagaatggacgccttgctgggtcctgcggccccgagagccccggcgccgtcctccaggcggaacgttacgccctcctccgcgctggtgcggtgcctgccgataaacgtcaccagatgcgggtggggggggcagtcggggaagtggctgtcgagcacgtagccctgcaccaagatctgcttaaagttcgggtgacgggggttcgcgaagacgggctcgcggcggaccagatccccggagctccaggacacgggggagatggtgtggcgtccgaggtcgggggcgccaaacagaagcacctccgagacaacgccgctatttaactccaccaaggcccgatccgcggcggagcaccgccttttttcgcccgaggcgtgggcctctgaccaggcctggtcttgcgtgacgagagcctcctccgggccggggacgcgcccgggcgcgaagtatcgcacgctgggcttcgggatcgaccggataaatgcccggaacgcctccggggaccggtgtgccatcaagtcctcgtacgcggaggccgtggggtcgctggggtccatggggtcgaaagcgtacttggcccggcatttgacctcgtaaaaggccaggggggtcttggggactggggccaggtagccgtgaatgtcccgaggacagacgagaatatccagggacgccccgaccatccccgtgtgaccgtccatgaggaccccacacgtatgcacgttctcttcggcgaggtcgctgggttcgtggaagataaagcgccgcgtgtcggcgccggcctcgccgccgtcgtccgcgcggcccacgcagtagcgaaacagcaggcttcgggccgtcggctcgttcacccgcccgaacatcaccgccgaagactgtacatccggccgcaggctggcgttgtgcttcagccactggggcgagaaacacggaccctgggggccccagcggagggtggatgcggtcgtgaggccccgccggagcagggcccatagctggcagtcggcctggttttgcgtggccgcctcgtaaaaccccatgaggggccggggcgccacggcgtccgcggcggccgggggcccgcggcgcgtcaggcgccataggtgccgaccgagtccgcggtccaccatacccgcctcctcgaggaccacggccagggaacacagataatccaggcgggcccagaggggaccgatggccagaggggcgcggacgccgcgcagcaacccgcgcaggtggcgctcgaacgtctcggctagtatatgggagggcagcgcgttggggatcaccgacgccgaccacatagagtcaaggtccggggagtcgggatcggcgtccgggtcgcgggcgtgggtgcccccaggagatagcggaatgtctggggtcggaggccctgaggcgtcagaaagtgccggcgacgcggcccggggcttttcgtctgcggtgtcggtggcgtgctgatcacgtggggggttaacgggcgaatgggagctcgggtccacagctgatgtcgtctggggtggggggggcaggggacggaaggtggttgtcagcggaagactgttagggcgggggcgcttgggggggctgtcggggccacgaggggtgtcctcggccagggcccagggacgcttagtcacggtgcgtcccggcggacatgctgggcctaccgtggactccatttccgagacgacgtggggggagcggtggttgagcgcgccgccgggtgaacgctgattctcacgacagcgcgtgccgcgcgcacgggttggtgtgacacaggcgggacaccagcaccaggagaggcttaagctcgggaggcagcgccaccgacgacagtatcgccttgtgtgtgtgctggtaatttatacaccgatccgtaaacgcgcgccgaatcttgggattgcggaggtggcgccggatgccctctgggacgtcatacgccaggccgtgggtgttggtctcggccgagttgacaaacagggctgggtgcagcacgcagcgataggcgagcagggccagggcgaagtccggcgacagctggttgttaaaatactggtaaccgggaaaccgggtcacgggtacgcccaggctcggggcgacgtacacgctaaccaccaactccagcagcgtctggcccagggcgtacaggtcaaccgctaacccgacgtcgtgcttcaggcggtggttggtaaattcggcccgttcgttgttaaggtatttcaccaacagctccgggggctggttatacccgtgacccaccagggtgtgaaagttggctgtggttagggcggtgggcatgccaaacatccggggggacttgaggtccggctcctggaggcaaaactgcccccgggcgatcgtggagttggagttgagggtgacgaggctaaagtcggcgaggacggcccgccggagcgagacggcgtccgaccgcagcatgacgaggatgttggcgcacttgatatccaggtggctgatcccgcaggtggtgtttaaaaacacaacggcgcgggccagctccgtgaagcactggtggagggccgtcgagaccgaggggtttgttgtgcgcagggacgccagttggccgatatacttaccgaggtccatgtcgtacgcggggaacactatctgtcgttgttgcagcgagaacccgaggggcgcgatgaagccgcggatgttgtgggtgcggccggcgcgtagaacgcactccccgaccaacagggtcgcgatgagctcaacggcaaaccactccttttcctttatggtcttaacggcaagcttatgttcgcgaatcagttggacgtcaccgtatcccccagaccccccgaagcttcgggccccggggatctcgagggtcgtgtagtgtagggcggggttgatggcgaacacggggctgcatagcttgcggatgcgcgtgagggtgaggatgtgcgagggggacgaggggggtgcggttaacgccgcctgggatctgcgcaggggcgggcggttcagtttggccgccgtaccgggcgtctcgggggacgcgcggcgatgagacgagcggctcattcgccatcgggatagtcccgcgcgaagccgctcgcggaggccggatcggtggcgggacccgtgggaggagcgggagacggcggcgtcctggagagaggggccgctggggcgcccggaggccccgtgggggttggagtgtacgtaggatgcgagccaatccttgaaggaccgttggcgtgcaccttgggggctgaggttagctgccacatgaccagcaggtcgctgtctgcgggactcatccatccttcggccaggtcgccgtctccccacagagaagcgttggtcgctgcttcctcgagttgctcctcctggtccgcaagacgatcgtccacggcgtccaggcgctcaccaagcgccggatcgaggtaccgtcggtgtgcggttagaaagtcacgacgcgccgcttgctcctccacgcgaattttaacacaggtcgcgcgctgtcgcatcatctctaagcgcgcgcgggactttagccgcgcctccaattccaagtgggccgcctttgcagccataaaggcgccaacaaaccgaggatcttgggtgctgacgccctcccggtgcagctgcagggtctggtccttgtaaatctcggctcggaggtgcgtctcggccaggcgtcggcgcagggccgcgtgggcggcatctcggtccattccgccaccctgcgggcgacccggggggtgctctgatagtctcgcgtgcccaaggcccgtgatcggggtacttcgccgccgcgacccgccacccggtgtgcgcgatgtttggtcagcagctggcgtccgacgtccagcagtacctggagcgcctcgagaaacagaggcaacttaaggtgggcgcggacgaggcgtcggcgggcctcaccatgggcggcgatgccctacgagtgccctttttagatttcgcgaccgcgacccccaagcgccaccagaccgtggtccctggcgtcgggacgctccacgactgctgcgagcactcgccgctcttctcggccgtggcgcggcggctgctgtttaatagcctggtgccggcgcaactaaaggggcgtgatttcgggggcgaccacacggccaagctggaattcctggcccccgagttggtacgggcggtggcgcgactgcggtttaaggagtgcgcgccggcggacgtggtgcctcagcgtaacgcctactatagcgttctgaatacgtttcaggccctccaccgctccgaagcctttcgccagctggtgcactttgtgcgggactttgcccagctgctcaaaacctccttccgggcctccagcctcacggagaccacgggcccccccaaaaaacgggccaaggtggacgtggccacccacggccggacgtacggcacgctggagctgttccaaaaaatgatccttatgcacgccacctactttctggccgccgtgctcctcggggaccacgcggagcaggtcaacacgttcctgcgtctcgtgtttgagatccccctgtttagcgacgcggccgtgcgccacttccgccagcgcgccaccgtgtttctcgtcccccggcgccacggcaagacctggtttctggtgcccctcatcgcgctgtcgctggcctcctttcgggggatcaagatcggctacacggcgcacatccgcaaggcgaccgagccggtgtttgaggagatcgacgcctgcctgcggggctggttcggttcggcccgagtggaccacgttaaaggggaaaccatctccttctcgtttccggacgggtcgcgcagtaccatcgtgtttgcctccagccacaacacaaacgtaagtcctcttttctttcgcatggctctcccaaggggccccgggtcgacccgacccacacccacccacccacatacacacacaaccagacgcgggaggaaagtctgccccgtgggcactgatttttattcgggatcgcttgaggaggcccgggcaacggcccgggcaacggtggggcaactcgtagcaaataggcgactgatgtacgaagagaagacacacaggcgccacccggcgctggtcggggggatgttgtccgcgccgcaccgtcccccgacgacctcttgcagacggtccgtgatgcaaggacggcggggggcctgcagcagggtgaccgtatccacgggatggccaaagagaagcggacacaggctagcatccccctggaccgccagggtacactgggccatcttggcccacagacacggggcgacgcagggacaggactccgttacgacggaggagagccacagtgcgttggcggaatcgatgtggggcggcggggcgcaggactcgcagccccccgggtggttggtgatcctggccaggagccatcccagatggcgggccctgcttcccggtggacagagcgaccccaggtcgctgtccatggcccagcagtagatctggccgctggggaggtgccaccaggcccccgggcccaaggcgcagcacgcgcccggctccgggggggtcttcgcggggaccagatacgcgccatccagctcgccgaccactggctcctccgcgagctgttcggtggttgggtcgggggtttcctccgggggggtggccgcccgtatgcgtgcgaacgtgagggtgcacaggagcggggtcagggggtgcgtcacgctccggaggtggacgatcgcgcagtagcggcgctcgcggttaaagaaaaagagggcaaagaaggtgttcgggggcaaccgcagcgccttggggcgcgtcagatacagaaaaatctcgcagaagagggcgcgcccggggtctgggttaggaagggccacctgacacagaggctcggtgaggaccgttagacaccgaaagatcttgagccgctcgtccgcccgaacgacgcgccacacaaagacggagttgacaatgcgcgcgatagagtcgacgtccgtccccaggtcgtcgactctatcgcgcgtgccgcgagctccggcccgggaatccggccggggcaaggtccccgggggaccaggcggcgccaggggccgccggggtcccagctgcgccatgccgggggcggggggagggcaaaccccagaggcgggggccaacggcgcggggaggagtgggtgggcgaggtggccgggggaaggcgcccgctagcgagaccggccgttcccggacgacaccttgcgacaaaacctaaggacagcggcccgcgcgacggggtccgagaggctaaggtaggccgcgatgttaatggtgaacgcaaagccgccgggaaagacaactatgccacagaggcggcgattaaaccccaggcagaggtaggcgtagctttccccgggcaggtattgctcgcagaccctgcgtggggctgtggaggggacggcctccatgaagcgacatttactctgctcgcgtttactgacgtcaccatccatcgccacggcgattggacgattgttaagccgcagcgtgtctccgcttgtgctgtagtagtcaaaaacgtaatggccgtcggagtcggcaaagcgggccgggaggtcgtcgccgagcgggacgacccgccgcccccgaccgccccgtccccccaggtgtgccaggacggccagggcatacgcggtgtgaaaaaaggcgtcgggggcggtcccctcgacggcgcgcatcaggttctcgaggagaatggggaagcgcctggtcacctcccccaaccacgcgcgttggtcggggccaaagtcatagcgcaggcgctgtgagattcgcgggccgccctgaagcgcggcccggatggcctggcccagggcccggaggcacgccagatgtatgcgcgcggtaaaggcgacctcggcggcgatgtcaaagggcggcaggacggggcgcgggtggcgcaggggcacctcgagcgcgggaaagcgtagcagcagctccgcctgcccagcgggagacagctggtgggggcgcacgacgcgttctgcggcgcaggcctcggtcagggccgtggccagcgccgaggacagcagcggagggcgggcgcgtcgcccgccccacgccacggagttctcgtaggagacgacgacgaagcgctgcttggttccgtagtggtggcgcaggaccacggagatagaacgacggctccacagccagtccggccggtcgccgccggccagggcttcccatccgcgatccaaccactcgaccagcgaccgcggctttgcggtaccaggggtaagggttagaacgtcgttcaggatgtcctcgcccccgggcccgtggggcgctggggccacaaagcggcccccgccggggggctccagacccgccagcaccgcatctgcgtcagccgcccccatggcgcccccgctgacggcctggtgaaccagggcgccctggcgtagccccgatgcaacgccacaggccgcacgcccggtccgcgctcggaccgggtggcggcgggtgacgtcctgcactgcccgctgaaccaacgcgaggatctcctcgttctcctgtgcgatggacacgtcctgggccgcggtcgtgtcgccgccgggggccgtcagctgctcctccggggagatgggggggtcggacgccccgacgatgggcgggtctgcgggcgcccccgcgtggggccgggccaagggctgcggacgcggggacgcgctttcccccagacccatggacaggtgggccgcagcctccttcgcggccggcggggcggcggcgccaagcagagcgacgtagcggcacaaatgccgacagacgcgcatgatgcgcgtgctgtcggccgcgtagcgcgtgttgggggggacgagctcgtcgtaactaaacagaatcacgcgggcacagctcgcccccgagccccacgcaaggcgcagcgccgccacggcgtacgggtcatagacgccctgcgcgtcacacaccacgggcagggagacgaacaaccccccggcgctggacgcacgcggaaggaggccagggtgtgccggcacgacgggggccagaagctcccccaccgcatccgcgggcacgtaggcggcaaacgccgtgcaccacggggtacagtcgccggtggcatgagcccgagtctggatttcgacctggaagtttgcggccgtcccgagtccggggcggccgcgcatcagggcggccagagggattcccgcggccgccaggcactcgctggatatgatgacgtgaaccaaagaccgagggccgacccgggccgtggccgagatcgtctggacctcgttggccaagtgcgcgttcatggttcgggggtgggtgtgggtgtgtaggcgatgcgggtcccccgagtccgcgggaagggcgtgggtttggcgcgcgtatgcgtattcgccaacggaggcgtgcgtgcttatgcgcggcgcgtttcttctgtctctagggaatccgaggccaggactttaacctgctctttgtcgacgaggccaactttattcgcccggatgcggtccagacgattatgggctttctcaaccaggccaactgcaagattatcttcgtgtcgtccaccaacaccgggaaggccagtacgagctttttgtacaacctccgcggggccgcagacgagcttctcaacgtggtgacctatatatgcgatgatcacatgccgagggtggtgacgcacacaaacgccacggcctgttcttgttatatcctcaacaagcccgttttcatcacgatggacggggcggttcgccggaccgccgatttgtttctggccgattccttcatgcaggagatcatcgggggccaggccagggagaccggcgacgaccggcccgttctgaccaagtctgcgggggagcggtttctgttgtaccgcccctcgaccaccaccaacagcggcctcatggcccccgatttgtacgtgtacgtggatcccgcgttcacggccaacacccgagcctccgggaccggcgtcgctgtcgtcgggcggtaccgcgacgattatatcatcttcgccctggagcacttttttctccgcgcgctcacgggctcggcccccgccgacatcgcccgctgcgtcgtccacagtctgacgcaggtcctggccctgcatcccggggcgtttcgcggcgtccgggtggcggtcgagggaaatagcagccaggactcggccgtcgccatcgccacgcacgtgcacacagagatgcaccgcctactggcctcggagggggccgacgcgggctcgggccccgagcttctcttctaccactgcgagcctcccgggagcgcggtgctgtacccctttttcctgctcaacaaacagaagacgcccgcctttgaacactttattaaaaagtttaactccgggggcgtcatggcctcccaggagatcgtttccgcgacggtgcgcctgcagaccgacccggtcgagtatctgctcgagcagctaaataacctcaccgaaaccgtctcccccaacactgacgtccgtacgtattccggaaaacggaacggcgcctcggatgaccttatggtcgccgtcattatggccatctacctcgcggcccaggccggacctccgcacacattcgctcctatcacacgcgtctcgtgagcgcccaataaacacacccaggtatgctacgcacgaccacggtgtcgtctgttaaggggggggggggaagggggtgttggcgggaagcgtgggaacacgggggattctctcacgaccggcaccagtaccacccccctgtgaacacagaaaccccaacccaaatcccataaacatacgacacacaggcatattttggaatttcttaggtttttatttatttaggtatgctggggtttctccctggatgcccacccccacccccccgtgggtctagccgggccttagggatagcgtataacgggggccatgtctccggaccgcacaacggccgcgccgtcaaaggtgcacacccgaaccacgggagccagggccaaggtgtctcctagttggcccgcgtgggtcagccaggcgacgagcgcctcgtaaagcggcagccttcgctctccatcctgcatcagggccggggcttcggggtgaatgagctgggcggcctcccgcgtgacactctgcatctgcagtagagcgttcacgtacccgtcctgggcacttagcgcaaagagccgggggattagcgtaaggatgatggtggttccctccgtgatcgagtaaaccatgttaaggaccagcgatcgcagctcggcgtttacgggaccgagttgttggacgtccgccagcagcgagaggcgactcccgttgtagtacagcacgttgaggtctggcagccctccggggtttctggggctggggttcaggtcccggatgcccctggccacgagccgcgccacgatttcgcgcgccaggggcgatggaagcggaacgggaaaccgcaacgtgaggtccagcgaatccaggcgcacgtccgtcgcttggccctcgaacacgggcgggacgaggctgatggggtccccgttacagagatctacgggggaggtgttgcgaaggttaacggtgccggcgtgggtgaggcccacgtccagggggcaggcgacgattcgcgtgggaagcacccgggtgatgaccgcggggaagcgccttcggtacgccagcaacaaccccaacgtgtcgggactgacgcctccggagacgaaggattcgtgcgccacgtcggccagcgtcagttgccggcggatggtcggcaggaataccacccgcccttcgcagcgctgcagcgccgccgcatcggggcgcgagatgcccgagggtatcgcgatgtcagtttcaaagccgtccgccagcatggcgccgatccacgcggcagggagtgcagtggtggttcgggtggcgggaggagcgcggtgggggtcagcggcgtagcagagacgggcgaccaacctcgcataggacggggggtgggtcttagggggttgggaggcgacagggaccccagagcatgcgcggggaggtctgtcgggcccagacgcaccgagagcgaatccgtccgcggagtcccggcttgggttttatggggcccggccctcggaatcgcggcttgtcggcggggacaaagggggcggggctaggggcttgcggaaacagaagacgcgtgggataaaagaatcgcactaccccaaggaagggcggggcggtttattacagagccagtcccttgagcggggatgcgtcatagacgagatactgcgcgaagtgggtctcccgcgcgtgggcttccccgttgcgggcactgcggaggagggcggggtcgctggcgcaggtgagcgggtaggcctcctgaaacaggccacacgggtcctccacgagttcgcggcaccccggggggcgcttaaactgtacgtcgctggcggcggtggccgtggacaccgccgaacccgtctccacgatcaggcgctccaggcagcgatgtttggcggcgatgtcggccgacgtaaagaacttaaagcaggggctgagcaccggcgaggccccgttgaggtggtaggccccgttatagagcaggtccccgtacgaaaatcgctgcgacgcccacgggttggccgtggccgcgaaggcccgggacgggtcgctctggccgtggtcgtacatgagggcggtgacatccccctccttgtcccccgcgtaaacgcccccggcggcgcgtccccgggggttgcagggccggcggaagtagttgacgtcggtcgacacgggggtggcgataaactcacacacggcgtcctggccgtggtccatccctgcgcgccgcggcacctgggcgcacccgaacacggggacgggctgggccggccccaggcggtttcccgccacgaccgcgttccgcaggtacacggctgccgcgttgtccaggagagggggagccccgcggcccaggtaaaagttttggggaaggttgcccatgtcggtgacggggttgcggacggttgccgtggccacgacggcggtgtagcccacgcccaggtccacgttcgcgcgcggctgggtgagcgtgaagtttacccccccgccagtttcgtgccgggccacctggagctggcccaggaagtacgcctccgacgcgcgctccgagaacagcacgttctcagtcacaaagcggtcctgtcggacgacggtgaacccaaacccgggatggaggcccgtcttgagctgatgatgcaaggccacgggactgatcttgaagtaccccgccatgagcgcgtaggtcagcgcgttctccccggccgcgctctcgcggacgtgctgcacgacgggctgtcggatcgacgaaaagtagttggcccccagagccggggggaccagggggacctgccgcgacaggtcgcgcagggccggggggaaattgggcgcgttcgccacgtggtcggccccggcgaacagcgcgtggacggggagggggtaaaaatagtcgccattttggatggtatggtccagatgctggggggccatcagcaggattccggcgtgcaacgccccgtcgaatatgcgcatgttggtggtggacgcggtgttggcgcccgcgtcgggcgccgccgagcagagcagcgccgttgtgcgttcggccatgttgtgggccagcacctgcagcgtgagcatggcgggcccgtccactaccacgcgcccgttgtgaaacatggcgttgaccgtgttggccaccagattggccgggtgcagggggtgcgcggggtccgtcacggggtcgctggggcactcctcgccgggggcgatctccgggaccaccatgttctgcagggtggcgtatacgcggtcgaagcgaacccccgcggtgcagcagcggccccgcgagaaggcgggcaccatcacgtagtagtaaatcttgtggtgcacggtccagtccgccccccggtgcggccggtcatccgcggcgtccgcggctcgggcctgggtgttgtgcagcagctggccgtcgttgcggttgaagtccgcggtcgccacgttacatgccgccgcgtacacggggtcgtggccccccgcgctaacccggcagtcgcgatggcggtccagggccgcgcgccgcatcagggcgtcacagtcccacacgaggggtggcagcagcgccgggtctcgcattaggtgattcagctcggcttgcgcctgcccgcccagctccgggccggtcagggtaaagtcatcaaccagctgggccagggcctcgacgtgcgccaccaggtcccggtacacggccatgcactcctcgggaaggtctcccccgaggtaggtcacgacgtacgagaccagcgagtagtcgttcacgaacgccgcgcaccgcgtgttgttccagtagctggtgatgcactggaccacgagccgggccagggcgcagaagacgtgctcgctgccgtgtatggcggcctgcagcaggtaaaacaccgccgggtagttgcggtcgtcgaacgccccgcgaacggcggcgatggtggcgggggccatggcgtggcgtcccacccccagctccaggccccgggcgtcccggaacgccgccggacatagcgccaggggcaagttgccgttcaccacgcgccaggtggcctggatctcccccgggccggccgggggaacgtccccccccggcagctccacgtcggccacccccacaaagaagtcgaacgcggggtgcagctcaagagccaggttggcgttgtcgggctgcataaactgctccggggtcatctggccttccgcgacccatcggacccgcccgtgggccaggcgctgcccccaggcgttcaaaaacagctgctgcatgtctgcggcggggccggccggggccgccacgtacgccccgtacggattggcggcttcgacggggtcgcggttaaggcccccgaccgccgcgtcaacgttcatcagcgaagggtggcacacggtcccgatcgcgtgttccagagacaggcgcagcacctggcggtccttcccccaaaaaaacagctggcggggcgggaaggcgcggggatccgggtggccgggggcggggactaggtccccggcgtgcgcggcaaaccgttccatgaccggattgaacaggcccaggggcaggacgaacgtcaggtccatggcgcccaccagggggtagggaacgttggtggcggcgtagatgcgcttctccagggcctccagaaagaccagcttctcgccgatggacaccagatccgcgcgcacgcgcgtcgtctggggggcgctctcgagctcgtccagcgtctgccggttcaggtcgagctgctcctcctgcatctccagcaggtggcggcccacgtcgtccagacttcgcacggccttgcccatcacgagcgccgtgaccaggttggccccgttcaggaccatctcgccgtacgtcaccggcacgtcggcttcggtgtcctccactttcaggaaggactgcaggaggcgctgtttgatcggggcggtggtgacgagcaccccgtcgaccggccgcccgcgcgtgtcggcatgcgtcagacggggcacggccacggagggctgcgtggccgtggtgaggtccacgagccaggcctcgacggcctcccggcggtggcccgccttgcccaggaaaaagctcgtctcgcagaagcttcgctttagctcggcgaccagggtcgcccgggccaccctggtggccaggcggccgttgtccaggtatcgttgcatcggcaacaacaaagccaggggcggcgccttttccagcagcacgtgcagcatctggtcggccgtgccgcgctcaaacgccccgaggacggcctggacgttgcgagcgagctgttggatggcgcgcaactggcgatgcgcgccgatacccgtcccgtccagggcctcccccgtgagcagggcgatggcctcggtggccaggctgaaggcggcgttcagggcccggcggtcgataatcttggtcatgtaattgtgtgtgggttgctcgatggggtgcgggccgtcgcgggcaatcagcggctggtggacctcgaactgtacgcgcccctcgttcatgtaggccagctccggaaacttggtacacacgcacgccaccgacaacccgagctccagaaagcgcacgagcgacagggtgttgcaatacgaccccagcagggcgtcgaactcgacgtcgtacaggctgtttgcatcggagcgcacgcgggaaaaaaaatcaaacaggcgtcgatgcgacgccacctcgatcgtgctaaggagggacccggtcggcaccatggccgcggcataccggtatcccggagggtcgcggttgggagcggccatggggtcgcgtggagatcggctgtctctagcgatattggcccggggaggctaagatccaccccaacgcccggccacccgtgtacgtgcccgacggcccaaggtccaccgaaagacacgacgggcccggacccaaaaaggcgggggatgctgtgtgagaggccgggtgccggtcgggggggaaaggcaccgggagaaggctgcggcctcgttccaggagaacccagtgtccccaacagacccggggacgtgggatcccaggccttatatacccccccccccgccccacccccgttagaacgcgacgggtgcattcaagatggccctggtccaaaagcgtgccaggaagaaattggcagaggcggcaaagctgtccgccgccgccacccacatcgaggccccggccgcgcaggctatccccagggcccgtgtgcgcaggggatcggtgggcggcagcatttggttggtggcgataaagtggaaaagcccgtccggactgaaggtctcgtgggcggcggcgaacaaggcacacagggccgtgcctcccaaaaacacggacatcccccaaaacacgggcgccgacaacggcagacgatccctcttgatgttaacgtacaggaggagcgcccgcaccgcccacgtaacgtagtagccgacgatggcggccaggatacaggccggcgccaccacccttccggtcagcccgtaatacatgcccgctgccaccatctccaacggcttcaggaccaaaaacgaccaaaggaacagaatcacgcgctttgaaaagaccggctgggtatggggcggaagacgcgagtatgccgaactgacaaaaaaatcagaggtgccgtacgaggacaatgaaaactgttcctccagcggcagttctccctcctcccccccgaaggcggcctcgtcgaccagatctcgatccaccagaggaaggtcatcccgcatggtcatggggtgtgcggtggaggtggggagaccgaaaccgcaaagggtcgcttacgtcagcaggatcccgagatcaaagacacccgggttcttgcacaaacaccacccgggttgcatccgcggaggcgagtgttttgataaggccgttccgcgccttgatataacctttgatgttgaccacaaaacccggaatttacgcctacgccccaatgcccacgcaagatgaggtaggtaacccccccgtgggtgtgacgttgcgtttagttcattggaggccaaggggaaaaatggggtggggaggaaacggaaaacccagtaggccgtgtcgggaacacgcccggggttgtcctcaaaaggcagggtccatactacggaagccgtcgttgtattcgagacctgcctgtgcaacgcacgtcggggttgcctgtgtccggttcggcccccaccgcgtgcggcacgcacgaggacgagtccgcgtgctttattggcgttccaagcgttgccctccagtttctgttgtcggtgttcccccatacccacgcccacatccaccgtagggggcctctgggccgtgttacgtcgccgcccgcgatggagcttagctacgccaccaccatgcactaccgggacgttgtgttttacgtcacaacggaccgaaaccgggcctactttgtgtgcggggggtgtgtttattccgtggggcggccgtgtgcctcgcagcccggggagattgccaagtttggtctggtcgttcgagggacaggcccagacgaccgcgtggtcgccaactatgtac

SEQ ID NO: 850 - DNA, 32767 bp, synthetic construct; identical to SEQ ID NO: 843
  misc_feature 1..32767: note = Synthetic construct
  source 1..32767: mol_type = other DNA

SEQ ID NO: 851 - DNA, 32767 bp, synthetic construct; identical to SEQ ID NO: 849
  misc_feature 1..32767: note = Synthetic construct
  source 1..32767: mol_type = other DNA

SEQ ID NO: 852 - DNA, 208 bp, synthetic construct
  misc_feature 1..208: note = miRT-1-143_1736
  source 1..208: mol_type = other DNA
ccatatacatacttctttacattccatcctgagctacagtgcttcatctcattgcatacatacttctttacattccaacgtgagctacagtgcttcatctcatccgatacatacttctttacattccacggcgagctacagtgcttcatctcaccttatacatacttctttacattccaaaaagagctacagtgcttcatctcaccat

SEQ ID NO: 853 - DNA, 308 bp, synthetic construct
  misc_feature 1..308: note = miRT-128m-122-219_6793
  source 1..308: mol_type = other DNA
cacgagaattgcgtttggacaatcagacacaaacaccattgtcacactccatcttaaagagaccggttcactgtggatgtcaaacaccattgtcacactccaacttagaattgcgtttggacaatcaagggaaagagaccggttcactgtggccagcaaacaccattgtcacactccaaaacaaagagaccggttcactgtggtacgagaattgcgtttggacaatcagaaaaaagagaccggttcactgtggaatacaaacaccattgtcacactccaacaaagaattgcgtttggacaatcaggtt

SEQ ID NO: 854 - DNA, 308 bp, synthetic construct
  misc_feature 1..308: note = miRT-128m-204-219_9304
  source 1..308: mol_type = other DNA
aagtaaagagaccggttcactgtggaataagaattgcgtttggacaatcaaggtaggcataggatgacaaagggaacagcaaagagaccggttcactgtggggctagaattgcgtttggacaatcacgtaaggcataggatgacaaagggaacgagaaagagaccggttcactgtgggggaagaattgcgtttggacaatcatactaggcataggatgacaaagggaattagaaagagaccggttcactgtggatttagaattgcgtttggacaatcatagaaggcataggatgacaaagggaattgt

SEQ ID NO: 855 - DNA, 324 bp, synthetic construct
  misc_feature 1..324: note = miRT-217-137-126m_3163
  source 1..324: mol_type = other DNA
tatgctacgcgtattcttaagcaataagacttccaatcagttcctgatgcagtacgaccacattattactcacggtacgaaagcctacgcgtattcttaagcaataaccgccacattattactcacggtacgataaatccaatcagttcctgatgcagtaattactacgcgtattcttaagcaataactattccaatcagttcctgatgcagtacccccacattattactcacggtacgagaattccaatcagttcctgatgcagtacagtcacattattactcacggtacgatcaactacgcgtattcttaagcaataaccaa

SEQ ID NO: 856 - protein, 1123 aa, Human alphaherpesvirus 1
MADRGLPSEAPVVTTSPAGPPSDGPMQRLLASLAGLRQPPTPTAETANGADDPAFLATAKLRAAMAAFLLSGTAIAPADARDCWRPLLEHLCALHRAHGLPETALLAENLPGLLVHRLVVALPEAPDQAFREMEVIKDTILAVTGSDTSHALDSAGLRTAAALGPVRVRQCAVEWIDRWQTVTKSCLAMSPRTSIEALGETSLKMAPVPLGQPSANLTTPAYSLLFPAPFVQEGLRFLALVSNRVTLFSAHLQRIDDATLTPLTRALFTLALVDEYLTTPERGAVVPPPLLAQFQHTVREIDPAIMIPPLEANKMVRSREEVRVSTALSRVSPRSACAPPGTLMARVRTDVAVFDPDVPFLSSSALAVFQPAVSSLLQLGEQPSAGAQQRLLALLQQTWTLIQNTNSPSVVINTLIDAGFTPSHCTHYLSALEGFLAAGVPARTPTGHGLGEVQQLFGCIALAGSNVFGLAREYGYYANYVKTFRRVQGASEHTHGRLCEAVGLSGGVLSQTLARIMGPAVPTEHLASLRRALVGEFETAERRFSSGQPSLLRETALIWIDVYGQTHWDITPTTPATPLSALLPVGQPSHAPSVHLAAATQIRFPALEGIHPNVLADPGFVPYVLALVVGDALRATCSAAYLPRPVEFALRVLAWARDFGLGYLPTVEGHRTKLGALITLLEPAARGGLGPTMQMADNIEQLLRELYVISRGAVEQLRPLVQLQPPPPPEVGTSLLLISMYALAARGVLQDLAERADPLIRQLEDAIVLLRLHMRTLSAFFECRFESDGRRLYAVVGDTPDRLGPWPPEAMGDAVSQYCSMYHDAKRALVASLASLRSVITETTAHLGVCDELAAQVSHEDNVLAVVRREIHGFLSVVSGIHARASKLLSGDQVPGFCFMGQFLARWRRLSACYQAARAAAGPEPVAEFVQELHDTWKGLQTERAVVVAPLVSSADQRAAAIREVMAHAPEDAPPQSPAADRVVLTSRRDLGAWGDYSLGPLGQTTAVPDSVDLSRQGLAVTLSMDWLLMNELLRVTDGVFRASAFRPLAGPESPRDLEVRDAGNSLPAPMPMDAQKPEAYGHGPRQADREGAPHSNTPVEDDEMIPEDTVAPPTDLPLTSYQ

SEQ ID NO: 857 - DNA, 152476 bp, Human alphaherpesvirus 1
  source 1..152476: mol_type = genomic DNA
agcccgggccccccgcgggcggggcggcgcgcaaaaaaagcgggcggcggtccgggcggcgtgcgcgcgcgcggcgggcgtggggggcggggccgcgggagcgggggaggagccccacccacagacggggaggagcgggggaggagccccacccacagacggggagcagcgggggaggagccccacccacagacggggaggagcgggggaggagccccacccacagacggggagcagcgggggaggagccccacccacagacggggaggagcgggggaggagccccacccacagacggggaggagcgggggaggagcgggggaggagcgggggaggagcgggggaggagcgggggaggagcgggggaggagcggccagaccccaaaaacgggcccccccccgaaacacaccccccgggggtcgcgcgcggccctttaaagcgcggcggcgggcagcccgggccccccgcggccgagactagcgagttagacaggcaagcactactcgcctctgcacgcacatgcttgcctgtcaaactctaccaccccggcacgctctctgtctccatggcccgccgccgccgccatcgcggcccccgccgcccccggccgcccgggcccacgggcgcggtcccaaccgcacagtcccaggtaacctccacgcccaactcggaacccgtggtcaggagcgcgcccgcggccgccccgccgccgccccccgccagtgggcccccgccttcttgttcgctgctgctgcgccagtggctccacgttcccgagtccgcgtccgacgacgacgacgacgacgactggccggacagccccccgcccgagccggcgccagaggcccggcccaccgccgccgccccccgcccccggtccccaccgcccggcgcgggcccggggggcggggctaacccctcccaccccccctcacgccccttccgccttccgccgcgcctcgccctccgcctgcgcgtcaccgcagagcacctggcgcgcctgcgcctgcgacgcgcgggcggggagggggcgccggagccccccgcgacccccgcgacccccgcgacccccgcgacccccgcgacccccgcgacccccgcgacccccgcgacccccgcgcgggtgcgcttctcgccccacgtccgggtgcgccacctggtggtctgggcctcggccgcccgcctggcgcgccgcggctcgtgggcccgcgagcgggccgaccgggctcggttccggcgccgggtggcggaggccgaggcggtcatcgggccgtgcctggggcccgaggcccgtgcccgggccctggcccgcggagccggcccggcgaactcggtctaacgttacacccgaggcggcctgggtcttccgcggagctcccgggagctccgcaccaagccgctctccggagagacgatggcaggagccgcgcatatatacgctgggagccggcccgcccccgaggcgggcccgccctctgagggtgggactggccaatcggcggccgccagcgcggcggggcccggccaaccagcgtccgccgagtcgtcggggcccggcccactgggcggtaactcccgcccagtgggccgggccgcccacttcccggtatggtaattaaaaacttgcaagaggccttgttccgcttcccggtatggtaattagaaactcattaatgggcggccccggccgcccttcccgcttccggcaattcccgcggcccttaatgggcaaccccggtattccccgcctcccgcgccgcgcgtaaccactcccctggggttccgggttatgctaattgcttttttggcggaacacacggcccctcgcgcattggcccgcgggtcgctcaatgaacccgcattggtcccctggggttccgggtatggtaatgagtttcttcgggaaggcgggaagccccggggcgccgacgcaggccaagcccctgttgcgtcggcgggaggggcatgctaatggggttctttgggggacaccgggttggtcccccaaatcgggggccgggccgtgcatgctaatgatattctttgggggcgccgggttggtccccggggacggggccgccccgcggtgggcctgcctcccctgggacgcgcggccattgggggaatcgtcactgccgcccctttggggaggggaaaggcgtggggtataagttagccctggcccgaccgtctggtcgcatttgcacctcggcactcggagcgagacgcagcagccaggcagactcgggccgccccctctccgcatcaccacagaagccccgcctacgttgcgacccccagggaccctccgtccgcgaccctccagccgcatacgacccccatggagccccgccccggagcgagtacccgccggcctgagggccgcccccaacgcgaggtgaggggccgggcgccatgtctggggcgccatattggggggcgccatgttgggggacccccgctcatacacgggagccgggcgccatgttggggcgccatgttagggggcgtggaaccccgtgacactatatatacagggaccgggggcgccatgttagggggcgcggaaccccctgaccctatatatacagggaccggggtcgccctgttgggggtcgccatgtgaccccctgactttatatatacagacccccccaacacatacacatggcccctttgactcagacgcagggcccggggtcgccgtgggaccccctgactcatacacagagacacgcccccacaacaaacacacagggaccggggtcgccgtgttagggggcgtggtccccactgactcatgcgcagggcccccttactcacacgcatctagggggtggggaggagccgcccgccatatttgggggacgccgtgggacccccgactccggtgcgtctggagggcgggagaagagggaagaagaggggtcgggatccaaaggacggacccagaccacctttggttgcagacccctttctcccccctcttccgaggccagcaggggggcaggactttgtgaggcggggggggggagagggggaactcgtgggcgctgattgacgcgggaaatccccccccccagtcttacccgcccccccttttttccccttagcccgccccggatgtctgggtgtttccctgcgaccgagacctgccggacagcagcgactctgaggcggagaccgaagtgggggggcggggggacgccgaccaccatgacgacgactccgcctccgaggcggacagcacggacacggaactgttcgagacggggctgctggggccgcagggcgtggatgggggggcggtctcgggggggagtcccccccgcgaggaagaccccggcagttgcgggggcgccccccctcgagaggacggggggagcgacgagggcgacgtgtgcgccgtgtgcacggatgagatcgcgccccacctgcgctgcgacaccttcccgtgcatgcaccgcttctgcatcccgtgcatgaaaacctggatgcaattgcgcaacacctgcccgctgtgcaacgccaagctggtgtacctgatagtgggcgtcacgcccagcgggtcgttcagcaccgtcccgatcgtgaacgacccccagacccgcatggaggccgaggaggccgtcagggcgggcacggccgtggactttatctggacgggcaatcagcggttcgccccgcggtacctgaccctgggggggcacacggtgagggccctgtcgcccacccaccctgagcccaccacggacgaggatgacgacgacctggacgacggtgaggcggggggcggcgaggaccctgggggaggaggaggaggaggggggagggaggaataggcgggcgggggggcgaggaaagggcgggccggggagggggcgtaacctgatcgcgccccccgttgtctcttgcagcagactacgtaccgcccgccccccgccggacgccccgcgcccccccacgcagaggcgccgccgcgccccccgtgacgggcggggcgtctcacgcagccccccagccggccgcggctcggacagcgcccccctcggcgcccatcgggccacacggcagcagtaacaccaacaccaccaccaacagcagcggcggtggcggcggctcccgccagtcgcgagccgcggcgccgcggggggcgtctggcccctccgggggggttggggttggggttggggttgttgaagcggaggcggggcggccgaggggccggacgggcccccttgtcaacagacccgccccccttgcaaacaacagagaccccatagtgatcagcgactcccccccggcctctccccacaggccccccgcggcgcccatgccaggctccgccccccgccccgggccccccgcgtcctcggccgcgtcgggacccgcgcgcccccgcgcggccgtggccccgtgcgtgcgagcgccgcctccggggcccggcccccgcgccccggcccccggggcggagccggccgcccgccccgcggacgcgcgccgtgtgccccagtcgcactcgtccctggctcaggccgcgaaccaagaacagagtctgtgccgggcgcgtgcgacggtggcgcgcggctcgggggggccgggcgtggagggtgggcacgggccctcccgcggcgccgccccctccggcgccgccccgctcccctccgccgtctctgtcgagcaggaggcggcggtgcgtccgaggaagaggcgcgggtcgggccaggaaaacccctccccccagtccacgcgtccccccctcgcgccggcaggggccaagagggcggcgacgcaccccccctccgactcagggccgggggggcgcggccagggtgggcccgggacccccctgacgtcctcggcggcctccgcctcttcctcctctgcctcttcctcctcggccccgactcccgcgggggccgcctcttccgccgccggggccgcgtcctcctccgcttccgcctcctcgggcggggccgtcggtgccctgggagggagacaagaggaaacctccctcggcccccgcgctgcttctgggccgcgggggccgaggaagtgtgcccggaagacgcgccacgcggagacttccggggccgtccccgcgggcggcctcacgcgctacctgcccatctcgggggtctctagcgtggtcgccctgtcgccttacgtgaacaagacgatcacgggggactgcctgcccatcctggacatggagacggggaacatcggggcgtacgtggtcctggtggaccagacgggaaacatggcgacccggctgcgggccgcggtccccggctggagccgccgcaccctgctccccgagaccgcgggtaaccacgtgacgccccccgagtacccgacggcccccgcgtcggagtggaacagcctctggatgacccccgtggggaacatgctgttcgaccagggcaccctagtgggcgccctggacttccgcagcctgcggtctcggcacccgtggtccggggagcagggggcgtcgacccgggacgagggaaaacaataagggacgccccccgtgtttgtggggagggggggtcgggcgctgggtggtctctggccgcgcccactacaccagccaatccgtgtcggggaggtggaaagtgaaagacacgggcaccacacaccagcgggtcttttgtgttggccctaataaaaaaaaactcaggggatttttgctgtctgttgggaaataaaggtttacttttgtatcttttccctgtctgtgttggatgtatcgcgggggtgcgtgggagtgggggtgcgtgggagtgggggtgcgtgggagtgggggtgcgtgggagtgggggtgcgtgggagtgggggtgcgtgggagtgggggtgcgtgggagtgggggtgcgtgggagtgggggtgcgtgggagtgggggtgccatgttgggcaggctctggtgttaaccacagagccgcggcccgggctgcctgaccaccgatccccgaaagcatcctgccactggcatggagccagaaccacagtgggttgggtgtgggtgttaagtttccgcgagcgcctgcccgcccggactgacctggcctctggccgccacaaagggcggggggggttaactacactatagggcaacaaaggacgggaggggtggcggggcgggacggggcgcccaaaagggggtcggccacaccacagacgtgggtgttggggggtggggcggagggggtgggggggggggggagacagaaacaggaacatagttagaaaacaagaatgcggtgcagccagagaatcacaggagacgaggggatgggcgtgttggttaccaacccacacccaggcatgctcggtggtatgaaggagggggggcggtgcttcttagagaccgccgggggacgtggggttggtgtgcagaggcacgcgcacccgcgtcggccaggtgggccggtaccccatccccccctcccccgacccttcccacccccgcgtgccagagatcacccccgtcccccggcacccgccactcctccatatcctcgctttaggaacaactttaggggggggtacacacgcgccgtgcatttccttccacaccccccctcccccgcaccccccccccaggcagtaagacccaagcatagagagccaggcacaaaaacacaggcggggtgggacacatgccttcttggagtacgtgggtcattggcgtggggggttacagcgacaccggccgaccccctggcggtcttccagccggcccttagataagggggcagttggtggtcggacgggtaagtaacagagtctgactaagggtgggagggggggggaaaagaacgggctggtgtgctgtaacacgagcccacccgcgagtggcgtggccgaccttagcctctggggcgccccctgtcgtttgggtcccccccctctattggggagaagcaggtgtctaacctacctggaaccgcggcgtctttgttgaaccacaccggggcgcccttgacgagtgggataacgggggaggaagggagggaggagggtactgggggtgaagaaggggggggggagaagcgagaacaggaaaggcgacggagcccgacaaaacaaaccgagaaaaaaaaaaaccacagcgcatgcgccgggccgttgtggggccccgggccggggccccttgggtccgccggggccccgggccgggccgccacgggggccggccgttggcggtaaccccgagtgttcatctcaggccccgggccgggaacccggaaaagcctccggggggcctttttcgcgtcgcgtgccggcgagcgggcccggacggggcccggaccgccgcggtcgggggcccctcgtcccgggccgtacgcggccttcgccccgtgaggggccgaacgaacgaaacatcccggcgacggaacgaaaaacaccccagacgggtttaaaaaacagaaaccgtaaccccccacccccgaaacggggaaaacaaaaaacagaccagcggccggccggcgcttagggggaggatgtcgccgacgccccttggccgccccggctgcaggggggcccggagagccgcggcacccggacgcgcccggaaagtctttcgcaccacccgcgatcggcacggccgcgcccccgcttttataaaggctcagatgacgcagcaaaaacaggccacagcaccacgtgggtaggtgatgtaattttattttcctcgtctgcggcctaatggatttccgggcgcggtgcccctgtctgcagagcacttaacggattgatatctcgcgggcacgcgcgcccttaatggaccggcgcggggcggggggccggatacccacacgggcgggggggggtgtcgcgggccgtctgctggcccgcggccacataaacaatgactctgggcctttctgcctctgccgcttgtgtgtgcgcgcgccggctctgcggtgtcggcggcggctgcggcggctgcggcggccgccgtgttcggtctcggtagccggccggcgggtggactcgcggggggccggagggtggaaggcaggggggtgtaggatgggtatcaggacttccacttcccgtccttccatcccccgttcccctcggttgttcctcgcctcccccaacaccccgccgctttccgttggggttgttattgttgtcgggatcgtgcgggccgggggtcgccggggcaggggcgggggcgtgggcgggggtgctcgtcgatcgaccgggctcagtgggggcgtggggtgggtgggaaaaggcgaggagactggggtggggggtgtcgggggtggctgttttttttgtggttgttttttgtgtctgtttccgtcccccgtcacccccctccctccgtccccccgtcgcgggtgtttgtgtttgtttattccgacatcggtttgtttaaataaacacagccgttctgcgtgtctgttcttgcgtgtggctgggggcttatatgtggggtcccgggggcgggatggggtttagcggcggggggcggcgcgccggacggggcgctggagataacggcccccggggaacgggggaccggggctgggtctcccgcggtgggtgggtgggcggcggtggccgggccgggccgggccgggtgggcggggtttggaaaaacgaggaggaggaggagggggggggagacggggggaaagcaaggacacggcccggggggggggggggggggagcgcgggccgggccgctcgtaagagccgcgacccggccgcctgggagcgttgtcgccgtcggtctgccggcccccgtccctcccttttttgaccaaccagcgccccccccctcaccaccattcctactaccaccaccaccaccaccaccaccgacacctcccgcgcacccccacccacactcccccccacccaacccgcaccacgagcacgggttgggggtagcaggggatcgacggggagcaaagccggtggggcggggcgggggcgggagaccgagtaggcccgcccatccgcggcccctcccggcagccacaccccccagcgtcgggtgtcacggggaaagagcaggggagaggggagagggggggagaggggagagggggggagaggggagagggggggagaggggagagggggggagaggggagagggggggagaggggagaggggggagaggggagagggggggagaggggagagggggggagaggggagagggggggagaggggagagggggggagaggggagaggggggagaggggagaggggggagaggggagaggggggagaggggagagggggggagaggggagagggggggagaggggagagggggggagaggggagagggggggagaggggagagggggggagaggggagagggggggagaggggagagggggggagaggggagagggggggagaggggagagggggggagaggggagagggggtatataaaccaacgaaaagcgcgggaacggggatacggggcttgtgtggcacgacgtcgtggttgtgttactgggcaaacacttggggcctgcaggtttctgtgggtaccgaccctaggtgttatggggattttgtgttgggtcgggcttatggccattggggttttgtgtgtaagggggggtttgtcttccaccgaatatgttattcggagtcgggtggctcgagaagtgggggatatattaaaggtgccttgtgtgccgcttccgtctgacgatcttgattggcgttacgagaccccctcggctataaactatgctttgatagacggtatatttttgcgttatcactgtcccggattggacacggtcttgtgggataggcacgcccagagggcgtattgggttaacccctttttgtttggggcgggttttttggaggacttgagtcatcccgcgtttcctgccgacacccaggaaacagaaacgcgcttggccctttataaagagatacgccaggcgctggacagtcgcaagcaggccgccagccacacacctgtgaaggctgggtgtgtgaactttgactattcgcgcacccgccgctgtgtagggcgccaggatttgggacttaccaacagaacgtctggacggaccccggttctgccgccggacgatgaagcgggcctgcagccgaagcccctcaccacgccgtcgcccatcatcgccacgtcggaccccaccccgcgacgggacgccgccacaaaaagcagacgccgacgaccccattcccggcgcctctaacgatgcctcgacggaaacccgtccgggttcggggggcgaaccggccgcctgtcgctcgtcagggccggcgggcgctcctcgccgccctagaggctgtcccgctggtgtgacgttttcctcgtccgcgccccccgaccctcccatggatttaacaaacgggggggtgtcgcctgcggcgacctcggcgtctctggactggaccacgtttcggcgtgtgtttctgatcgacgacgcgtggcggcccctgttggagcctgagctggcgaaccccttaaccgcccacctcctggtcgaatataatcgtcggtgccagaccgaagaggtgctgccgccgcgggaggatgtgttttcgtggactcgttattgtacccccgacgaggtgcgcgtggttatcatcggccaggacccatatcaccaccccggccaggcgcacggacttgcgtttagcgtgcgcgcgaacgtgccgcctcccccgagtcttcggaatgtcttggcggccgtcaagaactgttatcccgaggcacggatgagcggccacggttgcctggaaaagtgggcgcgggacggcgtcctgttactaaacacgaccctgaccgtcaagcgcggggcggcggcgtcccactctagaattggttgggaccgcttcgtgggcggagttatccgccggttggccgcgcgccgccccggcctggtgtttatgctctggggcgcacacgcccagaatgccatcagaccggaccctcgggtccattgcgtcctgaagttttcgcacccgtcgcccctctccaaggttccgttcggaacctgccagcatttcctcgtggcgaaccgatacctggaaacccggtcgatttcacccatcgactggtcggtttgaaaggcatcgacgtccggggttttcgtctgtgggggcttttgggtatttccgatgaataaagacggttaatggttaaacctctggtctcatacgggtcggtgatgtcgggcgtcgggggagagggagttccctctgcgcttgcgattctagcctcgtggggctggacgttcgacacgccaaaccacgagtcagggatatcgccagatacgactcccgcagattccattcggggggccgctgtggcctcacctgaccaacctttacacgggggcccggaacgggaggccacagcgccgtctttctccccaacgcgcgcggatgacggcccgccctgtaccgacgggccctacgtgacgtttgataccctgtttatggtgtcgtcgatcgacgaattagggcgtcgccagctcacggacaccatccgcaaggacctgcggttgtcgctggccaagtttagcattgcgtgcaccaagacctcctcgttttcgggaaacgccccgcgccaccacagacgcggggcgttccagcgcggcacgcgggcgccgcgcagcaacaaaagccttcagatgtttgtgttgtgcaaacgcgcccacgccgctcgagtgcgagagcagcttcgggtcgttattcagtcccgcaagccgcgcaagtattacacgcgatcttcggacgggcggctctgccccgccgtccccgtgttcgtccacgagttcgtctcgtccgagccaatgcgcctccaccgagataacgtcatgctggcctcgggggccgagtaaccgcccccccgcgccaccctcactgcccgtcgcgcgtgtttgatgttaataaataacacataaatttggctggttgtttgttgtctttaatggaccgcccgcagggggggtggcatttcagtgtcgggtgacgagcgcgatccggccgggatcctaggaccccaaaagtttgtctgcgtattccagggcggggctcagttgaatctcccgcagcacctctaccagcaggtcagcggtgggctggagaaactcggccgtcccggggcaggcggtcgtcgggggtggaggcgcggcgcccaccccgtgtgccgcgcctggcgtctcctctgggggcgacccgtaaatggttgcagtgatgtaaatggtgtccgcggtccagaccacggtcaaaatgccggccgtggcgctccgggcgctttcgccgcgcgaggagctgacccaggagtcgaacggatacgcgtacatatgggcgtcccacccgcgttcgagcttctggttgctgtcccggcctataaagcggtaggcacaaaattcggcgcgacagtcgataatcaccaacagcccaatgggggtgtgttggataacaacgcctccgcgcggcaggcggtcctggcgctcccggccccgtaccatgatcgcgcgggtgccgtactcaaaaacatgcaccacctgcgcggcgtcgggcagtgcgctggtcagcgaggccctggcgtggcataggctatacgcgatggtcgtctgtggattggacatctcgcggtgggtagtgagtcccccgggccgggttcggtggaactgtaaggggacggcgggttaatatacaatgaccacgttcggatcgcgcagagccgatagtatgtgctcactaatgacgtcatcgcgctcgtggcgctcccggagcggatttaagttcatgcgaaggaattcggaggaggtggtgcgggacatggccacgtacgcgctgttgaggcgcaggttgccgggcgtaaagcagatggcgaccttgtccaggctaaggccctgggagcgcgtgatggtcatggcaagcttggagctgatgccgtagtcggcgtttatggccatggccagctccgtagagtcaatggactcgacaaactcgctgatgttggtgttgacgacggacatgaagccgtgttggtcccgcaagaccacgtaaggcaggggggcctcttccagtaactcggccacgttggccgtcgcgtgccgcctccgcagctcgtccgcaaaggcaaacacccgtgcgtacgtgtatcccatgagcgtataattgtccgtctgcagggcgacggacatcagccccccgcgcggcgagccggtcagcatctcgcagccccggaagataacgttgtccacgtacgtgctaaagggggcgccttcgaatgcctccccgaagagctcttggaggattcggaatctcccgaggaaggcccgcttcagcagcgcaaactgggtgtgaacggcggcggtggtctccggttccccgggggtgtagtggcagtaaaacacgtcgagctgttgttcgtccagccccgcgaaaataacgtcgaggtcgtcgtcgggaaaatcgtccgggcccccgtcccgcggccccagttgcttaaaatcaaacgcacgctcgccaggggcgcctgcgtcggccattaccgacgcctgcgtcggcgcccccgaagatttggggcgcagagacagaatctccgccgttagttctcccatgcgggcgtaggcgagggtcctctgggtcgcatccaggcccgggcgctgcagaaagttgtaaaaggagataagcccgctaaatatgagccgcgacaggaacctgtaggcaaactccaccgaagtctccccctgagtctttacaaagctgtcgtcacgcaacactgcctcgaaggcccggaacgtcccactaaacccaaaaaccagttttcgcaggcgcgcggtcaccgcgatctggctgttgaggacgtaagtgacgtcgttgcgggccacgaccagctgctgtttgctgtgcacctcgcagcgcatgtgccccgcgtcctggtcctggctctgcgagtagttggtgatgcggctggcgttggccgtgagccacttttcaatagtcaggccgggctggtgtgtcagccgtcggtattcgtcaaactccttgaccgacacgaacgtaagcacggggagggtgaacacgacaaactccccctcacgggtcaccttcaggtaggcgtggagcttggccatgtacgcgctcacctctttgtgggaggagaacaaccgcgtccagccggggaggttggcggggttggtgatgtagttttccgggacgacgaagcgatccacgaactgcatgtgctcctcggtgatgggcaggccgtactccagcaccttcatgaggttaccgaactcgtgctcgacgcaccgtttgttgttaataaaaatggcccagctatacgagaggcgggcgtactcgcgcagcgtgcggttgcagatgaggtacgtgagcacgttctcgctctggcggacggaacaccgcagtttctggtgctcgaaggtcgactccagggacgccgtctgcgtcggcgagcccacacacaccaacacgggccgcaggcgggccgcgtactggggggtgtggtacagggcgttaatcatccaccagcaatacaccacggccgtgaggaggtgacgcccaaggagcccggcctcgtcgatgacgatcacgttgctgcgggtaaaggccggcagcgccccgtaggtggccggggccaaccgcgtcagggcgccctcggccaaccccagggtccgttccagggcggccagggcgcgaaactcgttccgcgactcctcgcccccggaggcggccagggtgcgcttcgtgaggtccaaaatcacctcccagtagtacgtcagatctcgtcgctgcaggtcctccagcgaggcggggttgctggtcagggtgtacgggtactgccccagttgggcctggacgtgattcccgcgaaacccaaattcatgaaagatggtgttgatgggtcggctgagaaaggcgcccgagagtttggcgtacatgttttgggccgcaatgcgcgtggcgcccgtcactacacagtccaagacctcgttgattgtctgcacgcacgtgctctttccggagccagcgttgccggtgataagatacaccgcgaacggaaactccctgaggggcaggcctgcgggggactctaaggccgccacgtcccggaaccactgcagacggggcacttgcgctccgtcgagctgttgttgcgagagctctcggatgcgcttaaggattggctgcaccccgtgcatagacgtaaaatttaaaaaggcctcggccctccctggaacggctggtcggtccccgggttgctgaaggtgcggcgggccgggtctctgtccgtctagctggcgctccccgccggccgccgccatgaccgcaccacgctcgcgggcccccactacgcgtgcgcgggtggacacggaagcgctgtgctcccccgaggacggctgggtaaaggttcaccccacccccggtacgatgctgttccgcgagattctccacgggcagctggggtataccgagggccagggggtgtacaacgtcgtccggtccagcgaggcgaccacccggcagctgcaggcggcgatctttcacgcgctcctcaacgccaccacttaccgggacctcgaggcggactggctcggccacgtggcggcccgcggtctgcagccccaacggctggttcgccggtacaggaacgcccgggaggcggatatcgccggggtggccgagcgggtgttcgacacgtggcggaatacgcttaggacgacgctgctggactttgcccacgggttggtcgcctgctttgcgtcgggcggcccgagcggcccgtcaagcttccccaaatatatcgactggctgacgtgcctggggctggtccccatattacgcaagcgacaagaagggggtgtgacgcagggtctgagggcgtttctcaagcagcacccgctgacccgccagctggccacggtcgcggaggccgcggagcgcgccggccccgggttttttgagctggcgttggccttcgactccacgcgcgtggcggactacgaccgcgtgtatatctactacaaccaccgccggggcgactggctcgtgcgagaccccatcagcgggcagcgcggagaatgtctggtgctgtggcctcccttgtggaccggggaccgtctggtcttcgattcgcccgtccagcggctgtttcccgagatcgtcgcgtgtcactccctccgggaacacgcgcacgtctgccggctgcgcaataccgcgtccgtcaaggtgctgctggggcgcaagagcgacagcgagcgcggggtggccggcgccgcgcgggtcgttaacaaggtgttgggggaggacgacgagaccaaggccgggtcggccgcctcgcgcctcgtgcggcttatcatcaacatgaagggcatgcgccacgtaggcgacattaacgacactgtgcgtgcctacctcgatgaggccggggggcacctgatagacgccccggccgtcgacggtaccctcccgggattcggcaagggcggaaacagccgcgggtctgcgggccaggaccagggggggcgggcgccgcagcttcgccaggccttccgcacggccgtggttaacaacatcaacggcgtgttggagggctatataaataacctgtttggaaccatcgagcgcctgcgcgagaccaacgcgggcctggcgacccagttgcaggagcgcgaccgcgagctccggcgcgcaacagcgggggccctggagcgccagcagcgcgcggccgacctggcggccgagtccgtgaccggtggatgcggcagccgccctgcgggggcggacctgctccgggccgactatgacattatcgacgtcagcaagtccatggacgacgacacgtacgtcgccaacagctttcagcacccgtacatcccttcgtacgcccaggacctggagcgcctgtcgcgcctctgggagcacgagctggtgcgctgttttaaaattctgtgtcaccgcaacaaccagggccaagagacgtcgatctcgtactccagcggggcgatcgccgcattcgtcgccccctactttgagtcagtgcttcgggccccccgggtaggcgcgcccatcacgggctccgatgtcatcctgggggaggaggagttatgggatgcggtgtttaagaaaacccgcctgcaaacgtacctgacagacatcgcggccctgttcgtcgcggacgtccagcacgcagcgctgcccccgcccccctccccggtcggcgccgatttccggcccggcgcgtccccgcggggccggtccagatcgcggtcgcccggaagaactgcgcgaggcgcgccggaccagggcgggggcatcgggcaccgggatggccgccgcgacggccgacgatgaggggtcggcagccaccatcctcaagcaggccatcgccggggaccgcagcctggtcgaggcggtcgaggcgattagccagcagacgctgctccgcctggcctgcgaggtgcgccaggtcggcgaccgccagccgcggtttaccgccaccagcatcgcgcgcgtcgacgtcgcgcctgggtgccggttgcggttcgttctggacgggagtcccgaggacgcctatgtgacgtcggaggattactttaagcgctgctgcggccagtccagttatcgcggcttcgcggtggcggtcctgacggccaacgaggaccacgtgcacagcctggccgtgccccccctcgttctgctgcaccggttctccctgttcaaccccagggacctcctggactttgagcttgcctgtctgctgatgtacctggagaactgcccccgaagccacgccaccccgtcgacctttgccaaggttctggcgtggctcggggtcgcgggtcgccgcacgtccccattcgaacgcgttcgctgccttttcctacgcagttgccactgggtcctaaacacactcatgttcatggtgcacgtaaaaccgttcgacgacgagttcgtcctgccccactggtacatggcccggtacctgctggccaacaacccgccccccgttctctcggccctgttctatgccaccccgacgagctcctcattccggctgccggggccgcccccccgctccgactgcgtggcctataaccccgccgggatcatggggagctgctgggcgtcggaggaggtgcgcgcgcctctggtctattggtggctttcggagaccccaaaacgacagacgtcgtcgctgttttatcagttttgttgaattttagtaaataaacccggttttgtttctatggcctcctgacggatgcgcgtgtccttactccgttttggtgggtgggtggctgtgtatggcgtcccatctgtgcggggagggggcaagtcggcacgtattcggacagactcaagcacacacgggggagcgctcttggctcagggcaatgtttttattggtcaaactcaggcaaacagaaacgacatcttgtcgtcaaagggatacacaaacttccccccctcgccccatactcccgccagcaccccggtaaacaccaactcaatctcgcgcaggatttcgcgcaggtgatgagcgcagtccacgggggggagcacaaggggccgcgggtatagatcgacggggacgccgaccgactccccgcctccgggacagacacgcacgacgcgccgccagtagtgctctgcgtccagcaaggcgccgccgcggaaggcagtggggggcaaggggtcgctggcctcaaagggggacacacgaacgctccagtactccgcgtccaaccgtttattaaacgcgtccacgataaggcggtcgcaggcgtcctccataaggccccgggccgtgagcgcgtcctcctccggcacgcctgccgttgtcaggcccaggacccgtcgcagcgtgtcgcgtacgaccccggccgccgtggtgtacgcgggcccgcggagaggaaatcccccaagatggtcagtgttgtcgcgggagttccagaaccacactcccgcttggctccaggcgacggcgtgggtgtagacgccctcgagcgccaggcacagtgggtgccgcagccggaggccgttggccctaagcacggctcccacggccgtctcgatggcccgccgggcgtcctcgatcaccccggaagccgcatccgcgtcttgggggtccacgttaaagacaccccagaacgcacccccatcgcccccgcagaccgcgaacttaaccgagctggccgtctcctcgatctgcaggcagacggcggccattaccccacccaggagctgccgcagcgcagggcaggcgtcgcacgtgtccgggaccaggcgctccaagacgaccccggcccagggctctgagggagcggccaccaccagcgcgtccagtcttgctaggcccgtccggccgtgggggtccgccagcccgctccccccgaggtcggccagggccgccaggagctgggcgcgaagtccggggaagcaaaaccgcgccgtccagacgggcccgacggccgcgggcgggtctaacagttggatgattttagtggcgggatgccaccgcgccaccgcctcccgcaccgcgggcaggaggcatccggctgccgccgaggccacgccgggccaggctcgcggggggaggacgaccctggcccccaccgcgggccaggcccccaggagcgcggcgtaagcggccgcggccccgcgcaccaggtcccgtgccgactcggtcgtggccggcacggtgaacgtgggccaacccggaaaccccaggacggcaaagtacgggacgggtcccccccggacctcaaactcgggccccagaaaggcaaagacgggggccagggccccgggggcggcgtggaccgtggtatgccactgccggaaaagggcgacgagcgccggcgcggagaacttctcgccggcgcttacaaagtagtcgtaatcgcggggcagcagcacccgtgccgtgactcgttgcgggtgcccgcgtggccgcaggcccacctcgcacacctcgaccaggtccccgaacgctccctccttcttgatcggcggaaacgcaagagtctggtattcgcgcgcaaatagcgcggttccggtggtgatgttaacggtcagcgaagcggcggacgcgcattggggggtgtcgcgaatggccgccaggcgcgcccacgccagccgcgcgtcgggatgctcggcaacgcgcgccgccagggccatagggtcgatgtcaatgttggcctccgcgaccaggagagcggcgcgaggggcggcgggcgggccccacgacgctctctcaactttcaccaccagtcccgtgcgtgggtccgagccgatacgcagcggggcgaacagggccaccggcccggtctggcgctccagggccgccaggacgcacgcgtacagcgcccgccacagagtcgggttctccaggggctccagcggggaggcggccggcgtcgtcgcggcgcgggcggccgccacgacggcctggacggagacgtccgcggagccgtagaaatcccgcagctccgtcgcggtgacggagacctccgcaaagcgcgcgcgaccctcccctgcggcgttgcgacatacaaaatacaccagggcgtggaagtactcgcgagcgcgggggggcagccataccgcgtaaagggtaatggcgctgacgctctcctccacccacacgatatctgcggtgtccatcgcacggcccctaaggatcacgggcggtctgtgggtcccatgctgccgtgcctggccgggcccggtgggtcgcggaaaccggtgacgggggggcggtttttggggttggggtgggggtgggaaacggcccgggtccgggggccaacttggcccctcggtgcgttccggcaacagcgccgccggtccgcggacgaccacgtaccgaacgagtgcggtcccgagacttatagggtgctaaagttcaccgccccctgcatcatgggccaggcctcggtggggagctccgacagcgccgcctccaggatgatgtcagcgttggggttggcgctggatgagtgcgtgcgcaaacagcgcccccacgcgggcacgcgtagcttgaagcgcgcgcccgcaaactcccgcttgtgggccataagcagggcgtacagctgcctgtgggtccggcatgcgctgtggtcgatgtggtgggcgtccaacaaccccacgattgtctgtttggtgaggtttttaacgcgccccgccccgggaaacgtctgcgtgcttttggccatctgcacgccaaacagttcgccccagattatcttgaacagcgccaccgcgtggtccgtctcgctaacggacccgcgcgggggacagccgcttagggcgtcggcgacgcgcttgacggcttcctccgagagcaggagtccgtcggttacgttacagtggcccagttcgaacaccagctgcatgtagcggtcgtagtggggggtcagcaggtccagcacgtcatcgtggctaaaggtcctcccagatcccccggccgccgagtcccaatgcaggcgcgcggccatggtgctgcacaggcacaacagctcccagacgggggttacgttcagggtggggggcagggccacgagctccagctctccagtaacgttgatcgtggggatgacgcccgtggcgtagtggtcatagatccgccgaaatatggcgctgctgcgggtggccatgggaacgcggagacaggcctccagcaacgccaggtaaataaaccgcgtgcgtcccatcaggctgttgaggttgcgcatgagcgcgacaatttccgccggcgcgacatcggaccggaggtatttttcgacgaaaagacccacctcctccgtctcggcggcctgggccggcagcgacgcctcgggatcccggcaccgcagctcccgtagatcgcgctgggccctgagggcgtcgaaatgtacgccccgcaaaaacagacagaagtcctttggggtcagggtatcgtcgtgtccccagaagcgcacgcgtatgcagtttagggtcagcagcatgtgaaggatgttaaggctgtccgagagacacgccagcgtgcatctctcaaagtagtgtttgtaacggaatttgttgtagatgcgcgacccccgccccagcgacgtgtcgcatgccgacgcgtcacagcgccccttgaaccggcgacacagcaggtttgtgacctgggagaactgcgcgggccactggccgcaggaactgaccacgtggttaaggagcatgggcgtaaagacgggctccgagcgcgccccggagccgtccatgtaaatcagtagctcccccttgcggagggtgcgcacccgtcccagggactggtacacggacaccatgtccggtccgtagttcatgggtttcacgtaggcgaacatgccatcaaagtgcaggggatcgaagctgaggcccacggttacgaccgtcgtgtatataaccacgcggtattggccccacgtggtcacgtccccgaggggggtgagcgagtgaagcaacagcacgcggtccgtaaactgacggcagaaccgggccacgatctccgcgaaggagaccgtcgacgaaaaaatgcagatgttatcgcccccgccaaggcgcgcttccagctccccaaaaaacgtggccccccgggcgtccggagaggcgtccggagacgggccgctcggcggcccgggtgggcgcagggcagcctgcaggagctcggtccccagacgcgggagaaacaggcaccggcgcgccgaaaacccgggcatggcgtactcgccgaccaccacatgcacgtttttttcgccccggagaccgcacaggaagtccaccaactgcgcgttggcggttgcgtccatggcgatgatccgaggacatgtgcgcagcaggcgtagcattaacgcatccacgcggcccagttgctgcattgttggcgaatagagctggcccagcgtcgacataacctcgtccagaacgaggacgtcgtagttgttcagaaggttggggcccacgcgatgaaggctttccacctggacgataagtcggtggaaggggcggtcgttcataatgtaattggtggatgagaagtaggtgacaaagtcgaccaggcctgactcagcgaaccgcgttgccagggtctgggtaaaactccgacgacaggagacgacgagcacattcgtgtccggagagtggatcgcttcccgcagccagcggatcagcgcggtagtttttcccgaccccattggcgcgcggaccacagtcacgcacctggccgtcggggcgctcgcgttggggaaggtgacgggtccgtgctgctgccgctcgatcgttgttttcgggtgaacccggggcacccattcggccaaatcccccccgtacaacatccgcgctagcgatacgctcgacgtgtactgttcgcactcgtcgtccccaatgggacgcccggcccccagaggatcccccgactccgcgccccccacgaaaggcatgaccggggcgcggacggcgtggtgggtctggtgtgtgcaggtggcgacgtttgtggtctctgcggtctgcgtcacggggctcctcgtcctggcctctgtgttccgggcacggtttccctgcttttacgccacggcgagctcttatgccggggttaactccacggccgaggtgcgcgggggtgtagccgtgcccctcaggttggacacgcagagccttgtgggcacttatgtaatcacggccgtgttgttgttggccgcggccgtgtatgccgtggtcggcgccgtgacctcccgctacgaccgcgccctggacgcgggccgccgtctggctgcggcccgcatggccatgccgcacgccacgctgatcgccggaaacgtctgttcttggttgctgcagatcaccgtcctgctgctggcccatcgcatcagccagctggcccacctggtttacgtcctgcactttgcgtgtctggtgtattttgcggcccatttttgcaccaggggggtcctgagcgggacgtatctgcgtcaggtgcacggcctgatggagctggccccgacccatcatcgcgtcgtcggcccggctcgcgccgtgctgacaaacgccttgctgttgggcgtcttcctgtgcacggccgacgccgcggtatccctgaataccatcgccgcgttcaactttaatttttcggccccgggcatgctcatctgcctgaccgtgctgttcgccattctcgtcgtatcgctgttgttggtggtcgagggggtgttgtgtcactacgtgcgcgtgttggtgggcccccacctgggggccgtggccgccacgggcatcgtcggcctggcctgcgagcactattacaccaacggctactacgtggtggagacgcagtggccgggggcacagacgggagtccgcgtcgccctcgccctggtcgccgcctttgccctcggcatggccgtgctccgctgcacccgcgcctatctgtatcacaggcggcaccacaccaaattttttatgcgcatgcgcgacacgcgacaccgcgcacattccgccctcaagcgcgtacgcagttccatgcgcggatcgcgagacggccgccacaggcccgcacccggcagcccgcccgggattcccgaatatgcggaagacccctacgcgatctcatacggcggccagctcgaccggtacggagattccgacggggagccgatttacgacgaggtggcggacgaccaaaccgacgtattgtacgccaagatacaacacccgcggcacctgcccgacgacgatcccatctatgacaccgttggggggtacgaccccgagcccgccgaggaccccgtgtacagcaccgtccgccgttggtagctgtttggttccgttttaataaaccgtttgtgtttaacacgaccgtggtgtatgtctggtgtgtggcgtccgatcccgttactatcaccgtccccccccccctcaaccccggtgattgtgggttttttaaaaacgacacgcgtgcgaccgtatacagaacattgttttggtttttattcgctatcggatatggggggtggaaactgggtggcggggcaggcgcctccgggggtccgccggtgagtgtggcgcgagggggggtccgacgaacgcaggcgcggtctccccggggcccgcgtaaccacgcgcatatccgggggcacgtagaaattaccttcctcttcggactcgatatccacgacgtcaaagtcgtgggcggtcagcgagacgacctccccgtcgtcggtgatgaggacgttgtttcggcagcagcagggccggttcccggagaacgagaggcccatagctcagcgagcgtgtcgtcgaacgccaggcggctgcttcgctggatggccttatagatctccggatcgatgcggacgggggtaatgatcagggcgatcggaacggcctggttcgggagaatggacgccttgctgggtcctgcggccccgagagccccggcgccgtcctccaggcggaacgttacgccctcctccgcgctggtgcggtgcctgccgataaacgtcaccagatgcgggtggggggggcagtcggggaagtggctgtcgagcacgtagccctgcaccaagatctgcttaaagttcgggtgacgggggttcgcgaagacgggctcgcggcggaccagatccccggagctccaggacacgggggagatggtgtggcgtccgaggtcgggggcgccaaacagaagcacctccgagacaacgccgctatttaactccaccaaggcccgatccgcggcggagcaccgccttttttcgcccgaggcgtgggcctctgaccaggcctggtcttgtgtgacgagagcctcctccgggccggggacgcgcccgggcgcaaagtatcgcacgctgggtttcgggatcgaccggataaatgcccggaacgcctccggggaccggtgtgccatcaagtcctcgtacgcggaggccgtggggtcgctggggtccatggggtcgaaagcgtacttggcccggcatttgacctcgtaaaaggccaggggggtcttggggactggggccaggtagccgtgaatgtcccgaggacagacgagaatatccagggacgccccgaccatccccgtgtgaccgtccatgaggaccccacacgtatgcacgttctcttcggcgaggtcgctgggttcgtggaagataaagcgccgcgtgtcggcgccggcctcgccgccgtcgtccgcgcggcccacgcagtagcgaaacagcaggcttcgggccgtcggctcgttcacccgcccgaacatcaccgccgaagactgtacatccggccgcaggctggcgttgtgcttcagccactggggcgagaaacacggaccctgggggccccagcggagggtggatgcggtcgtgaggccccgccggagcagggcccatagctggcagtcggcctggttttgcgtggccgcctcgtaaaaccccatgaggggccggggcgccacggcgtccgcggcggccgggggcccgcggcgcgtcaggcgccataggtgccggccgagtccgcggtccaccatacccgcctcctcgaggaccacggccagggaacacagataatccaggcgggcccagaggggaccgatggccagaggggcgcggacgccgcgcagcaacccgcgcaggtggcgctcgaacgtctcggctagtatatgggagggcagcgcgttggggatcaccgacgccgaccacatagagtcaaggtccggggagtcgggatcggcgtccgggtcgcgggcgtgggtgcccccaggagatagcggaatgtccggggtcggaggcccggaggcgtcagaaagtgccggcgacgcggcccggggcttttcgtctgcggtgtcggtggcgtgctgatcacgtggggggttatcgggcgaatgggagctcgggtccacagctgacgtcgtctggggtggggggggcaggggacggaaggtggttgtcagcggaagactgttagggcgggggcgcttgggggggctgtcggggccacgaggggtgtcctcggccagggcccagggacgcttagtcacggtgcgtcccggcggacatgctgggcctaccgtggactccatttccgagacgacgtggggggagcggtggttgagcgcgccgccgggtgaacgctgattctcacgacagcgcgtgccgcgcgcacgggttggtgtgacacaggcgggacaccagcaccaggagaggcttaagctcgggaggcagcgccaccgacgacagtatcgccttgtgtgtgtgctggtaatttatacaccgatccgtaaacgcgcgccgaatcttgggattgcggaggtggcgccggatgccctctgggacgtcatacgccaggccgtgggtgttggtctcggccgagttgacaaacagggctgggtgcagcacgcagcgataggcgagcagggccagggcgaagtccggcgacagctggttgttgaaatactggtaaccgggaaaccgggtcacgggtacgcccaggctcggggcgacgtacacgctaaccaccaactccagcagcgtctggcccagggcgtacaggtcaaccgctagcccgacgtcgtgcttcaggcggtggttggtaaattcggcccgttcgttgttaaggtatttcaccaacagctccgggggctggttatacccgtgacccaccagggtgtgaaagttggctgtggttagggcggtgggcatgccaaacatccggggggacttgaggtccggctcctggaggcaaaactgcccccgggcgatcgtggagttggagttgagggtgacgaggttaaagtcggcgaggacggcccgccggagcgagacggcgtccgaccgcagcatgacgaggatgttggcgcacttgatatccaggtggctgatcccgcaggtggtgtttaaaaacacaacggcacgggccagctccgtgaagcactggtggagggccgtcgagaccgaggggtttgttgtgcgcagggacgccagttggccgatatacttaccgaggtccatgtcgtacgcggggaacactatctgtcgttgttgcagcgagaacccgaggggcgcgatgaagccgcggatgttgtgggtgcggccggcgcgtagagcgcactccccgaccaacagggtcgcgatgagctcaacggcaaaccactccttttcctttatggtcttaacggcaagcttatgttcgcgaatcagttggacttcgccgtatcccccagaccccccgaagcttcgggccccggggatctcgagggtcgtgtagtgtagggcggggttgatggcgaacacggggctgcatagcttgcggatgcgcgtgagggtgaggatgtgagagggggacgaggggggtgcggttaacgccgcctgggatctgcgcaggggcgggcggttcagtttggccgccgtaccgggcgcctcgggggacgcgcggcgatgagacgagcggctcattcgccatcgggatagtcccgcgcgaagccgctcgcggaggccggatcggtggcgggacccgtgggaggagcgggagacggcggcgttctggagagaggggccgctggggcgcccggaggccccgtgggggttggagtgtatgtaggatgcgagccaatccttgaaggaccgttggcgtgcaccttgggggctgaggttagctgccacatgaccagcaggtcgctgtctgcgggactcatccatccttcggccaggtcgccgtctccccacagagaagcgttggtcgctgcctcctcgagttgctcctcctggtccgcaagacgatcgtccacggcgtccaggcgctcaccaagcgccggatcgaggtaccgtcggtgtgcggttagaaagtcacgacgcgccgcttgctcctccacgcgaattttaacacaggtcgcgcgctgtcgcatcatctctaagcgcgcgcgggactttagccgcgcctccaattccaagtgggccgcctttgcagccataaaggcgccaacaaaccgaggatcttgggtgctgacgccctcccggtgcagctgcagggtctggtccttgtaaatctcggctcggaggtgcgtctcggccaggcgtcggcgcagggccgcgtgggcggcatctcggtccattccgccaccctgcgggcgacccggggggtgctctgatagtctcgcgtgcccaaggcccgtgatcggggtacttcgccgccgcgacccgccacccggtgtgcgcgatgtttggtcagcagctggcgtccgacgtccagcagtacctggagcgcctcgagaaacagaggcaacttaaggtgggcgcggacgaggcgtcggcgggcctcacaatgggcggcgatgccctacgagtgccctttttagatttcgcgaccgcgacccccaagcgccaccagaccgtggtcccgggcgtcgggacgctccacgactgctgcgagcactcgccgctcttctcggccgtggcgcggcggctgctgtttaatagcctggtgccggcgcaactaaaggggcgtgatttcgggggcgaccacacggccaagctggaattcctggcccccgagttggtacgggcggtggcgcgactgcggtttaaggagtgcgcgccggcggacgtggtgcctcagcgtaacgcctactatagcgttctgaacacgtttcaggccctccaccgctccgaagcctttcgccagctggtgcactttgtgcgggactttgcccagctgctcaaaacctccttccgggcctccagcctcacggagaccacgggcccccccaaaaaacgggccaaggtggacgtggccacccacggccggacgtacggcacgctggagctgttccaaaaaatgatccttatgcacgccacctactttctggccgccgtgctcctcggggaccacgcggagcaggtcaacacgttcctgcgtctcgtgtttgagatccccctgtttagcgacgcggccgtgcgccacttccgccagcgcgccaccgtgtttctcgtcccccggcgccacggcaagacctggtttctggtgcccctcatcgcgctgtcgctggcctcctttcgggggatcaagatcggctacacggcgcacatccgcaaggcgaccgagccggtgtttgaggagatcgacgcctgcctgcggggctggttcggttcggcccgagtggaccacgttaaaggggaaaccatctccttctcgtttccggacgggtcgcgcagtaccatcgtgtttgcctccagccacaacacaaacgtaagtcctcttttctttcgcatggctctcccaaggggccccgggtcgacccgacccatacccacccacccacatacacacacaaccagacgcgggaggaaagtctgccccgtgggcactgatttttattcgggatcgcttgaggaggcccgggcaacggcccgggcaacggtggggcagctcgtagcaaataggcgactgatgtacgaagagaagacacacaggcgccacccggcgctggtcggggggatgttgtccgcgccgcaccgtcccccgacgacctcttgcagacggtccgtgatgcaaggacggcggggggcctgcagcagggtgaccgtatccacgggatggccaaagagaagcggacacaggctagcatccccctggaccgccagggtacactgggccatcttggcccacagacacggggcgacacagggacaggactccgttacgacggaggagagccacagtgcgttggcggaatcgatgtggggcggcggggcgcaggactcgcagccccccgggtggttggtgatcctggcaaggagccatcccagatggcgggccctgcttcccggtggacagagcgaccccaggtcgctgtccatggcccagcagtagatctggccgctggggaggtgccaccaggcccccgggcccaaggcgcagcacgcgcccggctccgggggggtcttcgcggggaccagatacgcgccatccagctcgccgaccactggctcctccgcgagctgttcggtggttgggtcgggggtttcctccgggggggtggccgcccgtatgcgggcgaacgtgagggtgcacaggagcggggtcagggggtgcgtcacgctccggaggtggacgatcgcgcagtagcggcgctcgcggttaaagaaaaagagggcaaagaaggtgttcgggggcaaccgcagcgccttggggcgcgtcagatacagaaaaatctcgcagaagagggcgcgcccggggtctgggttaggaagggccacctgacacagaggctcggtgaggaccgttaaacaccgaaagatcttgagccgctcgtccgcccgaacgacgcgccacacaaagacggagttgacaatgcgcgcgatagagtcgacgtccgtccccaggtcgtcgactctgtcgcgcgcgccgcgagttccggcccgggaatccggccggggcaaggtccccgggggaccaggcggcgccaggggccgccggggtcccagctgcgccatgccgggggcggggggagggcaaaccccagaggcgggggccaacggcgcggggaggagtgggtgggcgaggtggccgggggaaggcgcccgctagcgagaccggccgttcccggacgacaccttgcgacaaaacctaaggacagcggcccgcgcgacggggtccgagaggctaaggtaggccgcgatgttaatggtgaacgcaaagccgccgggaaagacaactatgccacagaggcggcgattaaaccccaggcagaggtaggcgtagctttccccgggcaggtattgctcgcagaccctgcgtggggctgtggaggggacggcctccatgaagcgacatttactctgctcgcgtttactgacgtcaccatccatcgccacggcgattggacgattgttaagccgcagcgtgtctccgcttgtgctgtagtagtcaaaaacgtaatggccgtcggagtcggcaaagcgggccgggaggtcgtcgccgagcgggacgacccgccgcccccgaccgccccgtccccccaggtgtgccaggacggccagggcatacgcggtgtgaaaaaaggcatcgggggcggtcccctcgacggcgcgcatcaggttctcgaggagaatggggaagcgcctggtcacctcccccagccacgcgcgttggtcggggccaaagtcatagcgcaggcgctgtgagattcgcgggccgccctgaagcgcggcccggatggcctggcccagggcccggaggcacgccagatgtatgcgcgcggtaaaggcgacctcggcggcgatgtcaaagggcggcaggacggggcgcgggtggcgcaggggcacctcgagcgcgggaaagcggagcagcagctccgcctgcccagcgggagacagctggtgggggcgcacgacgcgttctgcggcgcaggcctcggtcagggccgtggccagcgccgaggacagcagcggagggcgggcgcgtcgcccgccccacgccactgagttctcgtaggagacgacgacgaagcgctgcttggttccgtagtggtggcgcaggaccacggagatagaacgacggctccacagccagtccggccggtcgccgccggccagggcttcccatccgcgatccaaccactcgaccagcgaccgcggctttgtggtaccaggggtaagggttagaacgtcgttcaggatgtcctcgcccccgggcccgtggggcgctggggccacaaagcggcccccgccggggggctccagacccgccagcaccgcatctgcgtcagccgcccccatggcgcccccgctgacggcctggtgaaccagggcgccctggcggagccccgatgcaacgccacaggccgcacgcccggtccgagcgcggaccgggtggcggcgggtgacgtcctgcattgcccgctgaaccaacgcgaggatctcctcgttctcctgtgcgatggacacgtcctgggccgcggtcatgtcgccgccgggggccgtcagctgctcctccggggagatgggggggtcggacgccccgacgatgggcgggtctgcgggcgcccccgcgtggggccgggccaagggctgcggacgcggggacgcgctttctcccagacccatggacaggtgggccgcagcctccttcgcggccggcggggcggcggcgccaagcagagcgacgtagcggcacaaatgccgacagacgcgcatgatgcgcgtgctgtcggccgcgtagcgcgtgttgggggggacgagctcgtcgtaactaaacagaatcacgcgggcacagctcgcccccgagccccacgcaaggcgcagcgccaccacggcgtacgggtcatagacgccctgcgcgtcacacaccacgggcagggagacgaacaaccccccggcgctggacgcacgcggaaggaggccagggtgtgccggcacgacgggggccagaagctcccccaccgcatccgcgggcacgtaggcggcaaacgccgtgcaccacggggtacagtcgccggtggcatgagcccgagtctggatttcgacctggaagtttgcggccgtcccgagtccggggcggccgcgcatcagggcggccagagggattcccgcggccgccaggcactcgctggatatgatgacgtgaaccaaagacgagggcctacccgggccgtggccgagatcgtactggacctcgttggccaagtgcgcgttcatggttcgggagtgggtgtgggtgtgtaggcgatgcgggtcccccgagtccgcgggaagggcgtgggtttggcgcgcgtatgcgtattcgccaacggaggcgtgcgtgcttatgcgcggcgcgtttcttctgtctccagggaatccgaggccaggactttaacctgctctttgtcgacgaggccaactttattcgcccggatgcggtccagacgattatgggctttctcaaccaggccaactgcaagattatcttcgtgtcgtccaccaacaccgggaaggccagtacgagctttttgtacaacctccgcggggccgccgacgagcttctcaacgtggtgacctatatatgcgatgatcacatgccgagggtggtgacgcacacaaacgccacggcctgttcttgttatatcctcaacaagcccgttttcatcacgatggacggggcggttcgccggaccgccgatttgtttctggccgattccttcatgcaggagatcatcgggggccaggccagggagaccggcgacgaccggcccgttctgaccaagtctgcgggggagcggtttctgttgtaccgcccctcgaccaccaccaacagcggcctcatggcccccgatttgtacgtgtacgtggatcccgcgttcacggccaacacccgagcctccgggaccggcgtcgctgtcgtcgggcggtaccgcgacgattatatcatcttcgccctggagcacttttttctccgcgcgctcacgggctcggcccccgccgacatcgcccgctgcgtcgtccacagtctgacgcaggtcctggccctgcatcccggggcgtttcgcggcgtccgggtggcggtcgagggaaatagcagccaggactcggccgtcgccatcgccacgcacgtgcacacagagatgcaccgcctactggcctcggagggggccgacgcgggctcgggccccgagcttctcttctaccactgcgagcctcccgggagcgcggtgctgtacccctttttcctgctcaacaaacagaagacgcccgcctttgaacactttattaaaaagtttaactccgggggcgtcatggcctcccaggagatcgtttccgcgacggtgcgcctgcagaccgacccggtcgagtatctgctcgagcagctaaataacctcaccgaaaccgtctcccccaacactgacgtccgtacgtattccggaaaacggaacggcgcctcggatgaccttatggtcgccgtcattatggccatctacctcgcggcccaggccggacctccgcacacattcgctcctatcacacgcgtctcgtgagcgcccaataaacacacccaggtatgctacgcacgaccacggtgtcgtctgttaagggggggggggaagggggtgttggcgggaagcgtgggaacacgggggattctctcacgaccggcaccagtaccacccccctgtgaacacagaaaccccaacccaaatcccataaacatacgacacacaggcatattttggaatttcttaggtttttatttatttaggtatgctggggtttttccctggatgcccacccccacccccccgtgggtctagccgggccttagggatagcgtataacgggggccatgtctccggaccgcacaacggccgcgccgtcaaaggtgcacacccgaaccacgggagccagggccaaggtgtctcctagttggcccgcgtgggtcagccaggcgacgagcgcctcgtagagcggcagccttcgctctccatcctgcatcagggccggggcttcggggtgaatgagctgggcggcctcccgcgtgacactctgcatctgcaggagagcgttcacgtacccgtcctgggcacttagcgcaaagagccgggggattagcgtaaggatgatggtggttccctccgtgatcgagtaaaccatgttaaggaccagcgatcgcagctcggcgtttacgggaccgagttgttggacgtccgccagcagcgagaggcgactcccgttgtagtacagcacgttgaggtctggcagccctccggggtttctggggctggggttcaggtcccggatgcccctggccacgagccgcgccacgatttcgcgcgccaggggcgatggaagcggaacgggaaaccgcaacgtgaggtccagcgaatccaggcgcacgtccgtcgcttggccctcgaacacgggcgggacgaggctgatggggtccccgttacagagatctacgggggaggtgttgcgaaggttaacggtgccggcgtgggtgaggcccacgtccagggggcaggcgacgattcgcgtgggaagcacccgggtgatgaccgcggggaagcgccttcggtacgccagcaacaaccccaacgtgtcgggactgacgcctccggagacgaaggattcgtgcgccacgtcggccagcgtcagttgccggcggatggtcggcaggaataccacccgcccttcgcagcgctgcagcgccgccgcatcggggcgcgagatgcccgagggtatcgcgatgtcagtttcaaagccgtccgccagcatggcgccgatccacgcggcagggagtgcagtggtggttcgggtggcgggaggagcgcggtgggggtcagcggcgtagcagagacgggcgaccaacctcgcataggacggggggtgggtcttagggggttgggaggcgacagggaccccagagcatgcgcggggaggtctgtcgggcccagacgcaccgagagcgaatccgtccgcggagtcccggcttgggttttatggggcccggccctcggaatcgcggcttgtcggcggggacaaagggggcggggctaggggcttgcggaaacagaagacgcgtgggataaaagaatcgcactaccccaaggaagggcggggcggtttattacagagccagtcccttgagcggggatgcgtcatagacgagatactgcgcgaagtgggtctcccgcgcgtgggcttccccgttgcgggcgctgcggaggagggcggggtcgctggcgcaggtgagcgggtaggcctcctgaaacaggccacacgggtcctccacgagttcgcggcaccccggggggcgcttaaactgtacgtcgctggcggcggtggccgtggacaccgccgaacccgtctccacaatcaggcgctccaggcagcgatgtttggcggcgatgtcggccgacgtaaagaacttaaagcaggggctgagcaccggcgaggccccgttgaggtggtaggccccgttatagagcaggtccccgtacgaaaatcgctgcgacgcccacgggttggccgtggccgcgaaggcccgggacgggtcgctctggccgtggtcgtacatgagggcggtgacatccccctccttgtcccccgcgtaaacgcccccggcggcgcgtccccgggggttgcagggccggcggaagtagttgacgtcggtcgacacgggggtggcgataaactcacacacggcgtcctggccgtggtccatccctgcgagccgcggcacctgggcgcacccgaacacggggacgggctgggccggccccaggcggtttcccgccacgaccgcgttccgcaggtacacggctgccgcgttgtccagtagagggggagccccgcggcccaggtaaaagttttggggaaggttgcccatgtcggtgacggggttgcggacggttgccgtggccacgacggcggtgtagcccacgcccaggtccacgttcccgcgcggctgggtgagcgtgaagtttacccccccgccagtttcgtgccgggccacctggagctggcccaggaagtacgcctccgacgcgcgctccgagaacagcacgttctcagtcacaaagcggtcctgtcggacgacggtgaacccaaacccgggatggaggcccgtcttgagctgatgatgcaaggccacgggactgatcttgaagtaccccgccatgagcgcgtaggtcagcgcgttctccccggccgcgctctcgcggacgtgctgcacgacgggctgtcggatcgacgaaaagtagttggcccccagagccggggggaccagggggacctgccgcgacaggtcgcgcagggccggggggaaattgggcgcgttcgccacgtggtcggccccggcgaacagcgcgtggacgggaagggggtaaaaatagtcgccattttggatggtatggtccagatgctggggggccatcagcaggattccggcgtgcaacgccccgtcgaatatgcgcatgttggtggtggacgcggtgttggcgcccgcgtcgggcgccgccgagcagagcagcgccgttgtgcgttcggccatgttgtgggccagcacctgcagcgtgagcatggcgggcccgtccactaccacgcgcccgttgtgaaacatggcgttgaccgtgttggccaccagattggccgggtgcagggggtgcgcggggtccgtcacggggtcgctggggcactcctcgccgggggcgatctccgggaccaccatgttctgcagggtggcgtatacgcggtcgaagcgaacccccgcggtgcagcagcggccccgcgagaaggcgggcaccatcacgtagtagtaaatcttgtggtgcacggtccagtccgccccccggtgcggccggtcatccgcggcgtccgcggctcgggcctgggtgttgtgcagcagctggccgtcgttgcggttgaagtccgcggtcgccacgttacacgccgccgcgtacacggggtcgtggcccccagcgctaacccggcagtcgcgatggcggtccagggccgcgcgccgcatcagggcgtcacagtcccacacgaggggtggcagcagcgccgggtctcgcattaggtgattcagctcggcttgcgcctgcccgcccagctccgggccggtcagggtaaagtcatcaaccagctgggccagggcctcgacgtgcgccaccaggtcccggtacacggccatgcactcctcgggaaggtctcccccgaggtaggtcacgacgtacgagaccagcgagtagtcgttcacgaacgccgcgcaccgcgtgttgttccagtagctggtgatgcactggaccacgagccgggccagggcacagaagacgtgctcgctgccgtgtatggcggcctgcagcaggtaaaacaccgccgggtagttgcggtcgtcgaacgccccgcgaacggcggcgatggtggcgggggccatggcgtggcgtcccacccccagctccaggccccgggcgtcccggaacgccgccggacatagcgccaggggcaagttgccgttcaccacgcgccaggtggcctggatctcccccgggccggccgggggaacgtccccccccggcagctccacgtcggccacccccacgaagaagtcgaacgcggggtgcagctcaagagccaggttggcgttgtcgggctgcataaactgctccggggtcatctggccttccgcgacccatcggacccgcccgtgggccaggcgctgcccccaggcgttcaaaaacagctgctgcatgtctgcggcggggccggccggggccgccacgtacgccccgtacggattggcggcttcgacggggtcgcggttaaggcccccgaccgccgcgtcaacgttcatcagcgaagggtggcacacggtcccgatcgcgtgttccagagacaggcgcagcacctggcggtccttcccccaaaaaaacagctggcggggcgggaaggcgcggggatccgggtggccgggggcggggactaggtccccggcgtgcgcggcaaaccgttccatgaccggattgaacaggcccaggggcaggacgaacgtcaggtccatggcgcccaccagggggtagggaacgttggtggcggcgtagatgcgcttctccagggcctccagaaagatcagcttctcgccgatggacaccagatccgcgcgcacgcgcgtcgtctggggggcgctctcgagctcgtccagcgtctgccggttcaggtcgagctgctcctcctgcatctccagcaggtggcggcccacgtcgtccagacttcgcacggccttgcccatcacgagcgccgtgaccaggttggccccgttcaggaccatctcgccgtacgtcaccggcacgtcggcttcggtgtcctccactttcaggaaggactgcaggaggcgctgtttgatcggggcggtggtgacgagcaccccgtcgaccggccgcccgcgcgtgtcggcatgcgtcagacggggcacggccacggagggctgcgtggccgtggtgaggtccacgagccaggcctcgacggcctcccggcggtggcccgccttgcccaggaaaaagctcgtctcgcagaagcttcgctttagctcggcgaccagggtcgcccgggccaccctggtggccaggcggccgttgtccaggtatcgttgcatcggcaacaacaaagccaggggcggcgccttttccagcagcacgtgcagcatctggtcggccgtgccgcgctcaaacgccccgaggacggcctggacgttgcgagcgagctgttggatggcgcgcaactggcgatgcgcgccgatacccgtcccgtccagggcctcccccgtgagcagggcgatggcctcggtggccaggctgaaggcggcgttcagggcccggcggtcgataatcttggtcatgtaattgtgtgtgggttgctcgatggggtgcgggccgtcgcgggcaatcagcggctggtggacctcgaactgtacgcgcccctcgttcatgtaggccagctccggaaacttggtacacacgcacgccaccgacaacccgagctccagaaagcgcacgagcgacagggtgttgcaatacgaccccagcagggcgtcgaactcgacgtcgtacaggctgtttgcatcggagcgcacgcgggaaaaaaaatcgaacaggcgtcgatgcgacgccacctcgatcgtgctaaggagggacccggtcggcaccatggccgcggcataccggtatcccggagggtcgcggttgggagcggccatggggtcgcgtggagatcggctgtctctagcgatattggcccggggaggctaagatccaccccaacgcccggccacccgtgtacgtgcccgacggcccaaggtccaccgaaagacacgacggacccggacccaaaaaggcgggggatgctgtgtgagaggccgggtgtcggtcgggggggaaaggcaccgggagaaggctgcggcctcgttccaggagaacccagtgtccccaacagacccggggacgtgggatccccggctttatataccccccgccccacccccgttagaacgcgacgggtgcattcaagatggccctggtccaaaagcgtgccaggaagaaattggcagaggcggcaaagctgtccgccgccgccacccacatcgaggccccggccacacaggctatccccagggcccgtatgcgcaggggatcggtgggcggcagcatttggttggtggcgataaagtggaaaagcccgtccggactgaaggtctcgtgggcggcggcgaacaaggcacacagggccgtgcctcccaaaaacacggacatcccccaaaacacgggcgccgacaacggcagacgatccctcttgatgttaacgtacaggaggagcgcccgcaccgcccacgtaacgtagtagccgacgatggcggccaggatacaggccggcgccaccacccttccggtcagcccgtaatacatgcccgctgccaccatctccaacggcttcaggaccaaaaacgaccaaaggaacagaatcacgcgctttgaaaagaccggctgggtatggggcggaagacgcgagtatgccgaactgacaaaaaaatcagaggtgccgtacgaggacaatgaaaactgttcctccagcggcagttctccctcctcccccccgaaggcggcctcgtcgaccagatctcgatccaccagaggaaggtcatcccgcatggtcatggggtgtgcggtggaggtggggagaccgaaaccgcaaagggtcgcttacgtcagcaggatcccgagatcaaagacacccgggttcttgcacaaacaccacccgggttgcatccgcggaggcgagtgttttgataaggccgttccgcgccttgatataacctttgatgttgaccacaaaacccggaatttacgcctacgccccaatgcccacgcaagatgaggtaggtaacccccccgtgggtgtgacgttgcgtttagttcattggaggccaaggggaaaaatggggtggggaggaaacggaaaacccagtaggccgtgtcgggaacacgcccggggttgtcctcaaaaggcagggtccatactacggaagccgtcgttgtattcgagacctgcctgtgcgacgcacgtcggggttgcctgtgtccggttcggcccccaccgcgtgcggcacgcacgaggacgagtccgcgtgctttattggcgttccaagcggtgccctccagtttctgttgtcggtgttcccccatacccacgcccacatccaccgtagggggcctctgggccgtgttacgtcgccacccgcgatggagcttagctacgccaccaccatgcactaccgggacgttgtgttttacgtcacaacggaccgaaaccgggcctactttgtgtgcggggggtgtgtttattccgtggggcggccgtgtgcctcgcagcccggggagattgccaagtttggtctggtcgttcgagggacaggcccagacgaccgcgtggtcgccaactatgtacgaagcgagctccgacaacgcggcctgcaggacgtgcgtcccattggggaggacgaggtgtttctggacagcgtgtgtcttctaaacccgaacgtgagctccgagctggatgtgattaacacgaacgacgtggaagtgctggacgaatgtctggccgagtactgcacctcgctgcgaaccagcccgggtgtgctaatatccgggctgcgcgtgcgggcgcaagacagaatcatcgagttgtttgaacacccaacgatagtcaacgtttcctcgcactttgtgtataccccgtccccatacgtgttcgccctggcccaggcgcacctcccccggctcccgagctcgctggaggccctggtgagcggcctgtttgacggcatccccgccccacgccagccacttgacgcccacaacccgcgcacggatgtggttatcacgggccgccgcgccccacgacccatcgccgggtcgggggcggggtcggggggcgcgggcgccaagcgggccaccgtcagcgagttcgtgcaagtcaaacacattgaccgcgtgggccccgctggcgtttcgccggcgcctccgccaaacaacaccgactcgagttccctggtgcccggggcccaggattccgccccgcccggccccacgctaagggagctgtggtgggtgttttatgccgcagaccgggcgctggaggagccccgcgccgactctggcctcacccgcgaggaggtacgtgccgtacgtgggttccgggagcaggcgtggaaactgtttggctccgcgggggccccgcgggcgtttatcggggccgcgttgggcctgagccccctccaaaagctggccgtttactactatatcatccaccgagagaggcgcctgtcccccttccccgcgctagtccggctcgtaggccggtacacacagcgccacggcctgtacgtccctcggcccgacgacccagtcttggccgatgccatcaacgggctggttcgcgacgcgctggcggccggaaccacagccgagcagctcctcatgttcgaccttctccccccaaaggacgtgccggtgggaagcgacgtgcaggccgacagcaccgctctgctgcgctttatagaatcgcaacgtctcgccgtccccgggggggtgatctcccccgagcacgtcgcgtaccttggtgcgttcctgagcgtgctgtacgctggccgcgggcgcatgtccgcagccacgcacaccgcgcggctgacaggggtgacctccctggtgctagcggtgggtgacgtggaccgtctttccgcgtttgaccgcggagcggcgggcgcggccagccgcacgcgggccgccgggtacctggatgtgcttcttaccgttcgtctcgctcgctccaaacacggacagtctgtgtaacagaccccaataaacgtatgtcgctaccacacccttgtgtgtcaatggacgcctctccgggggggaagggaaaacaaagaggggctgggggagcggcaccaccggggcctgaacaaacaaaccacagacacggttacagtttattcggtcgggcgtataaacggccgaagccacgccccctttattcgcgtctccaaaaaaacgggacacttgtccggagaacctttaggatgccagccagggcggcggtaatcataaccacgcccagcgcagaggcggccagaaacccgggcgcaattgcggccacgggctgcgtgtcaaaggctagcaaatgaatgacggttccgtttggaaatagcaacaaggccgtggacggcacgtcgctcgaaaacacgcttggggcgccctccgtcggcccggcggcgatttgctgctgtgtgttgtccgtatccaccagcaacacagacatgacctccccggctggggtgtagcgcataaacacggcccccacgagccccaggtcgcgctggttttgggtgcgcaccagccgcttggactcgatatcccgggtggagccttcgcatgtcgcggtgaggtaggttaggaacagtgggcgtcggacgtcgacgccggtgagcttgtagccgatcccccggggcagaggggagtgggtgacgacgtagctggcgttgtgggtgatgggtaccaggatccgtggctcgacgttggcagactgccccccgcaccgatgtgaggcctcagggacgaaggcgcggatcagggcgttgtagtgtgcccagcgcgtcagggtcgaggcgaggccgtgggtctgctgggccaggacttcgaccggggtctcggatcgggtggcttgagccagcgcgtccaggataaacacgctctcgtctagatcaaagcgcagggaggccgcgcatggcgaaaagtggtccggaagccaaaagagggttttctggtggtcggcccgggccagcgcggtccggaggtcggcgttggtcgctgcggcgacgtcggacgtacacagggccgatgctatcagaaggctccggcgggcgcgttcccgctgcaccgccgaggggacgcccgccaagaacggctgccggaggacagccgaggcgtaaaatagcgcccggtggacgaccggggtggtcagcacgcggccccctagaaactcggcatacagggcgtcgatgagatgggctgcgctgggcgccactgcgtcgtacgccgaggggctatccagcacgaaggccagctgatagcccagcgcgtgtaatgccaagctctgttcgcgctccagaatctcggccaccaggtgctggagccgagcctctagctgcaggcgggccgtgggatccaagactgacacattaaaaaacacagaatccgcggcacagcccgcggccccgcgggcggccaacccggcaagcgcgcgcgagtgggccaaaaagcctagcaggtcggagaggcagaccgcgccgtttgcgtgggcggcgttcacgaaagcaaaacccgacgtcgcgagcagccccgttaggcgccagaagaaaggggggcgcgggccctgctcggcgcccgcgccccccgagaaaaactccgcgtatgcccgcgacaggaactgggcgtagttcgtgccctcctccgggtagccgcccacgcggcggagggcgtccagcgcggagccgttgtcggcccgcgtcagggaccctaggacaaagacccgataccgggggccgcccgggggcccgggaagagcccccggggggttttcgtccgcggggtccccgacccgatctagcgtctggcccgcggggaccaccatcacttccaccggagggctgtcgtgcatggatatcacgagccccatgaattcccgcccgtagcgcgcgcgcaccagcgcggcatcgcacccgagcaccagctcccccgtcgtccagatgcccacgggccacgtcgaggccgacggggagaaatacacgtacctacctggggatctcaacaggccccgggtggccaaccaggtcgtggacgcgttgtgcaggtgcgtgatgtccagctccgtcgtcgggtgccgccgggccccaaccggcggtcgggggggcggtgtatcacgcggcccgctcgggtggctcgccgtcgccacgttgtctccccgcgggaacgtcagggcctcggggtcagggacggccgaaaacgttacccaggcccgggaacgcagcaacacggaggcggctggattgtgcaagagacccttaaggggggcgaccgaggggggaggctgggcggtcggctcgaccgtggtgggggcgggcaggctcgcgttcgggggccggccgagcaggtaggtcttcgggatgtaaagcagctggccggggtcccgcggaaactcggccgtggtgaccaatacaaaacaaaagcgctcctcgtaccagcgaagaaggggcagagatgccgtagtcaggtttagttcgtccggcggcgccagaaatccgcgcggtggtttttgggggtcgggggtgtttggcagccacagacgcccggtgttcgtgtcgcgccagtacatgcggtccatgcccaggccatccaaaaaccatgggtctgtctgctcagtccagtcgtggacctgaccccacgcaacgcccaaaataataacccccacgaaccataaaccattccccatgggggaccccgtccctaacccacggggcccgtggctatggcagggcctgccgccccgacgttggctgcgagccctgggccttcacccgaacttggggggtggggtggggaaaaggaagaaacgcgggcgtattggccccaatggggtctcggtggggtatcgacagagtgccagccctgggaccgaaccccgcgtttatgaacaaacgacccaacacccgtgcgttttattctgtctttttattgccgtcatagcgcgggttccttccggtattgtctccttccgtgtttcagtgagcctcccccatctcccgggcaaacgtgcgcgccaggtcgcagatcgtcggtatggagcctggggtggtgacatgggtctggaccatcccggaggtaagttgcagcagggcgtcccggcagccggcgggcgattggtcgtaatccaggataaagacgtgcatgggacggaggcgtttggccaagacgtccaaggcccaggcaaacacgttgtacaggtcgccgttgggggccagcaactcgggggcccgaaacagggtaaataacgtttccccgatatggggtcgtgggcccgcgttgctctggggctcggcaccctggggcgtcaaggccgtccccgaaagctgtccccaatcctcccgccacgacccgccgcactgcagataccgcaccgtattggcaagtagcccgtaaacgcggcgaatcgcggccagcatagccaggtcaagccgctcaccggggcgctggcgtttggccaggcggtcgatgtgtctgtcctccggaagggcccccaacacgatgtttgtgccgggcaaggtcggcgggatgagggccacgaacgccagcacggcctggggggtcatgctgcccataaggtaccgcgcggccgggtagcacaggagggcggcgatgggatggcggtcgaagatgagggtgagggccgggggcggggcatgtgagctcccagcctcccccccgatatgaggagccagaacggcgtcggtcacggcataaggcatgcccattgttatctgggcgcttgtcattaccaccgccgcgtccccggccgatatctcaccctggtcgaggcggtgttgtgtggtgtagatgttcgcgattgtctcggaagcccccagcacccgccagtaagtcatcggctcgggtacgtagacgatatcgtcgcgcgaacccagggccaccagcagttgcgtggtggtggttttccccatcccgtggggaccgtctatataaacccgcagtagcgtgggcattttctgttccgggcggacttccgtggcttcttgctgccggcgagggcgcaacgccgtacgtcggttgctatggccgcgagaacgcgcagcctggtcgaacgcagacgcgtgttgatggcaggggtacgaagccatacgcgcttctacaaggcgcttgccgaagaggtgcgggagtttcacgccaccaagatctgcggcacgctgttgacgctgttaagcgggtcgctgcagggtcgctcggtgttcgaggccacacgcgtcaccttaatatgcgaagtggacctgggaccgcgccgccccgactgcatctgcgtgttcgaattcgccaatgacaagacgctgggcggggtttgtgtcatcatagaactaaagacatgcaaatatatttcttccggggacaccgccagcaaacgcgagcaacgggccacggggatgaagcagctgcgccactccctgaagctcctgcagtccctcgcgcctccgggtgacaagatagtgtacctgtgccccgtcctggtgtttgtcgcccaacggacgctccgcgtcagccgcgtgacccggctcgtcccgcagaaggtctccggtaatatcaccgcagtcgtgcggatgctccagagcctgtccacgtatacggtccccatggagcctagaacccagcgagcccgtcgccgccgcggcggcgccgcccgggggtctgcgagcagaccgaaaaggtcacactctggggcgcgcgacccgcccgagccagcggcccgccagttaccacccgccgaccaaacccccgcctccacggagggcgggggggtgcttaagaggatcgcggcgctcttctgcgtgcccgtggccaccaagaccaaaccccgagccgcctccgaatgagagtgtttcgttccttccccctccccccgcgtcagacaaaccctaaccaccgcttaagcggcccccgcgaggtccgaagactcatttggatccggcgggagccacctgacaacagcccccgggtttccccacgccagacgccggtccgctgtgccatcgctccccctcatcccacccccatcttgtccccaaataaaacaaggtctggtagttaggacaacgaccgcagttctcgtgtgttattgtcgctctccgcctctcgcagatggacccgtattgcccatttgacgctctggacgtctgggaacacaggcgcttcatagtcgccgattcccgaaacttcatcacccccgagttcccccgggacttttggatgtcgcccgtctttaacctcccccgggagacggcggcggagcaggtggtcgtcctgcaggcccagcgcacagcggctgccgctgccctggagaacgccgccatgcaggcggccgagctccccgtcgatatcgagcgccggttacgcccgatcgaacggaacgtgcacgagatcgcaggcgccctggaggcgctggagacggcggcggccgccgccgaagaggcggatgccgcgcgcggggatgagccggcgggtgggggcgacgggggggcgcccccgggtctggccgtcgcggagatggaggtccagatcgtacgcaacgacccgccgctacgatacgacaccaacctccccgtggatctgctacacatggtgtacgcgggccgcggggcgaccggctcgtcgggggtggtgttcgggacctggtaccgcactatccaggaccgcaccatcacggactttcccctgaccacccgcagtgccgactttcgggacggccggatgtccaagaccttcatgacggcgctggtcctgtccctgcagtcgtgcggccggctgtatgtgggccagcgccactattccgccttcgagtgcgccgtgttgtgtctctacctgctgtaccgaaacacgcacggggccgccgacgatagcgaccgcgctccggtcacgttcggggatctgctgggccggctgccccgctacctggcgtgcctggccgcggtgatcgggaccgagggcggccggccacagtaccgctaccgcgacgacaagctccccaagacgcagttcgcggccggcgggggccgctacgaacacggagcgctggcgtcgcacatcgtgatcgccacgctgatgcaccacggggtgctcccggcggccccgggggacgtcccccgggacgcgagcacccacgttaaccccgacggcgtggcgcaccacgacgacataaaccgcgccgccgccgcgttcctcagccggggccacaacctattcctgtgggaggaccagactctgctacgggcaaccgcgaacaccataacggccctgggcgttatccagcggctcctcgcgaacggcaacgtgtacgcggaccgcctcaacaaccgcctgcagctgggcatgctgatccccggagccgtcccttcggaggccatcgcccgtggggcctccgggtccgactcgggggccatcaagagcggagacaacaatctggaggcgctatgtgccaattacgtgcttccgctgtaccgggccgacccggcggtcgagctgacccagctgtttcccggcctggccgccctgtgtcttgacgcccaggcggggcggccggtcgggtcgacgcggcgggtggtggatatgtcatcgggggcccgccaggcggcgctggtgcgcctcaccgccctggaactcatcaaccgcacccgcacaaaccccacccccgtgggggaggttatccacgcccacgacgccctggcgatccaatacgaacaggggcttggtctgctggcgcagcaggcacgcattggcttgggctccaacaccaagcgtttctccgcgttcaacgttagcagcgactacgacatgttgtactttttatgtctggggttcattccacagtacctgtcggcggtttagtgggtggtgggcgaggggggagggggcattagggagaaagaacaagagcctccgttgggttttctttgtgcctgtactcaaaaggtcataccccgtaaacggcgggctccagtcccggcccggcggttggcgtgaacgcaacggcgggagctgggttagcgtttagtttagcattcgctctcgcctttccgcccgccccccgaccgttgcgcctttttttttttttttcgtccaccaaagtctctgtgggtgcgcgcatggcagccgatgccccgggagaccggatggaggagcccctgccagacagggccgtgcccatttacgtggctgggtttttggccctgtatgacagcggggactcgggcgagttggcattggatccggatacggtgcgggcggccctgcctccggataacccactcccgattaacgtggaccaccgcgctggctgcgaggtggggcgggtgctggccgtggtcgacgacccacgcgggccgttttttgtggggctgatcgcctgcgtgcagctggagcgcgtcctcgagacggccgccagcgctgcgattttcgagcgccgcgggccgccgctctcccgggaggagcgcctgttgtacctgatcaccaactacctgccctcggtctccctggccacaaaacgcctggggggcgaggcgcaccccgatcgcacgctgttcgcgcacgtcgcgctgtgcgcgatcgggaggcgcctcggcactatcgtcacctacgacaccggtctcgacgccgccatcgcgccctttcgccacctgtcgccggcgtctcgcgagggggcgcggcgactggccgccgaggccgagctcgcgctgtccggacgcacctgggcgcccggcgtggaggcgctgacccacacgctgctttccaccgccgttaacaacatgatgctgcgggaccgctggagcctggtggccgagcggcggcggcaggccgggatcgccggacacacctacctccaggcgagcgaaaaattcaaaatgtggggggcggagcctgtttccgcgccggcgcgcgggtataagaacggggccccggagtccacggacataccgcccggctcgatcgctgccgcgccgcagggtgaccggtgcccaatcgtccgtccgcgcggggtcgcctcgcccccggtactgccccccatgaaccccgttccgacatcgggcaccccggcccccgcgccacccggcgacgggagctacctgtggatcccggcctcccattacaaccagctcgtcgccagccacgccgcgccccaaccccagccgcattccgcgtttggtttcccggctgcggcgggggccgtggcctatgggcctcacggcgcgggtctttcccagcattaccctccccacgtcgcccatcagtatcccggggtgctgttctcgggacccagcccactcgaggcgcagatagccgcgttggtgggggccatagccgcggaccgccaggcgggcggtcagccggccgcgggagaccctggggtccgggggtcgggaaagcgtcgccggtacgaggcggggccgtcggagtcctactgcgaccaggacgaaccggacgcggactacccgtactaccccggggaggctcgaggcgggccgcgcgccgagagtcgaccccgcgcggcccgccagtctcccgggaccaacgagaccatcacggcgctgatgggggcggtgacgtctctgcagcaggaactggcgcacatgcgggctcggaccagtgccccctatggaatgtacacgccggtggcgcactatcgccctcaggtgggggagccggaaccaacaacgacccacccggccctttatcccccggaggccgtgtatcgccccccaccacacagcgccccctacggtcctccccagggtccggcgtcccatgcccccactcccccgtatgccccagctgcctgcccgccaggcccgccaccgcccccatgtccttccacccagacgcgcgcccctctaccgacggagcccgcgttcccccccgccgccaccggatcccaaccggaggcatccaacgcggaggccggggcccttgtcaacgccagcagcgcagcacacgtggacgttgacacggcccgcgccgccgatttgttcgtctctcagatgatgggggcccgctgattcgccccggtctttggtaccatgggatgtcttactgtatatctttttaaataaaccaggtaataccaaataagacccattggtgtatgttctttttttattgggaggcgcgggtaggcgggtagctttacaatgcaaaagccttcgacgtggaggaaggcgtggggggggggggaatcggcactgaccaagggggtccgttttgtcacgggaaaggaaagaggaaacaggccgcggacacccgggggagtttatgtgttcccttttctttcttcccacacacacaaaaggcgtaccaaacaaacaaaccaaaagatgcacatgcggtttaacacccgtggtttttatttacaacaaaccccccgtcacaggtcgtcctcgtcggcgtcaccgtctttgttgggaacttgggtgtagttggtgttgcggcgcttgcgcatgaccatgtcggtgaccttggcgctgagcagcgcgctcgtgcccttcttcttggccttgtgttccgtgcgctccatggcagacaccagggccatgtaccgtatcatctcccgggcctcggctagcttggcctcgtcaaagtcgccgccctcctcgccctccccggacgcgtccgggttggtggggttcttgagctccttggtggttagcgggtacagggccttcatggggttgctctgcagccgcatgacgtagcgaaaggcgaagaaggccgccgccaggccggccaggaccaacagacccacggccagcgccccaaaggggttggacatgaaggaggacacgcccgacacggccgataccacgccgcccacgatgcccatcaccaccttgccgaccgcgcgccccaggtcgcccatcccctcgaagaacgcgcccaggcccgcaaacatggcggcgttggcgtcggcgtggatgaccgtgtcgatgtcggcgaagcgcaggtcgtgcagctggttgcggcgctggacctccgtgtagtccagcaggccgctgtccttgatctcgtggcgggtgtacacctccagggggacaaactcgtgatcctccagcatggtgatgttgaggtcgatgaaggtgctgacggtggtgatgtcggcgcggctcagctggtgggagtacgcgtactcctcgaagtacacgtagcccccaccgaaggtgaagtagcgccggtgtcccacggtgcacggctcgatcgcatcgcgcgtcagccgcagctcgttgttctcccccagctgcccctcgaccaacgggccctggtcttcgtaccgaaagctgaccagggggcggctgtagcaggccccgggccgcgagctgatgcgcatcgagttttggacgatcacgttgtccgcggcgaccggcacgcacgtggagacggccatcacgtcgccgagcatccgcgcgctcacccgccggcccacggtggccgaggcgatggcgttggggttcagcttgcgggcctcgttccacagggtcagctcgtgattctgcagctcgcaccacgcgatggcaacgcggcccaacatatcgttgacatggcgctgtatgtggttgtacgtaaactgcagccgggcgaactcgatggaggaggtggtcttgatgcgctccacggacgcgttggcgctggccccgggcggcgggggcgtggggtttgggggcttgcggttctgctctcggaggtgttcccgcacgtacagctccgcgagcgtgttgctgagaaggggctggtacgcgatcagaaagcccccattggccaggtagtactgcggctggcccaccttgatgtgcgtcgcgttgtacctgcgggcgaagatgcggtccatggcgtcgcgggcgtccttgccgatgcagtcccccaggtccacgcgcgagagcgggtactcggtcaggttggtggtgaaggtggtggatatggcgtcggaggagaatcggaaggagccgccgtactcggagcgcagcatctcgtccacctcctgccacttggtcatggtgcagaccgacgggcgctttggcacccagtcccaggccacggtgaacttgggggtcgtgagcaggttccgggtggtcggcgccgtggcccgggccttggtggtgaggtcgcgcgcgtagaagccgtcgacctgcttgaagcggtcggcggcgtagctggtgtgttcggtgtgcgacccctcccggtagccgtaaaacggggacatgtacacaaagtcgccagtcgccaacacaaactcgtcgtacgggtacaccgagcgcgcgtccacctcctcgacgatgcagtttaccgtcgtcccgtaccggtggaacgcctccacccgcgaggggttgtacttgaggtcggtggtgtgccagccccggctcgtgcgggtcgcggcgttggccggtttcagctccatgtcggtctcgtggtcgtcccggtgaaacgcggtggtctccaggttgttgcgcacgtacttggccgtggaccgacagacccccttggcgttgatcttgtcgatcacctcctcgaaggggacgggggcgcggtcctcaaagatccccataaactgggagtagcggtggccgaaccacacctgcgaaacggtgacgtctttgtagtacatggtggccttgaacttgtacggggcgatgttctccttgaagaccaccgcgatgccctccgtgtagttctgaccctcgggccgggtcgggcagcggcgcggctgctcgaactgcaccaccgtggcgcccgtggggggtgggcacacgtaaaagtttgcatcggtgttctccgccttgatgtcccgcaggtgctcgcgcagggtggcgtggccggcggcgacggtcgcgttgtcgccggcggggcgcggcggcgttgggtttttcggttttttgttcttcttcggtttcgggtccaccgttggggcggcgccaagggcgggcggcgccggagtggcagggcccccgttagccgccggggtcgcggccgcgaccccaggcgcgccgggggaactcggagccgccgacgccaccaggacccccagcgtcaaccccaagagcgcccatacgacgaaccaccggcgcccccgcgcgggggcgccctggcgcatggcgggactacgggggcccgtcgtgccccccgtcaggtagcctgggggcgaggtgctggaggaccgagtagaggatcgagaaaacgtctcggtcgtagaccacgaccgaccgggggccgatacagccgtcgggggcgctctcgacgatggccaccagcggacagtcggagtcgtacgtgagatatacgccgggcgggtaacggtaacgaccttcggaggtcgggcggctgcagtccgggcggcgcaactcgagctccccgcaccggtagaccgaggcaaagagtgtggtggcgataatcagctcgcgaatatatcgccaggcggcgcgctgagtgggcgttattccggaaatgccgtcaaaacagtaaaacctctgaaattcgctgacggcccaatcagcacccgagccccccgcccccatgatgaaccgggcgagctcctccttcaggtgcggcaggagccccacgttctcgacgctgtaatacagcgcggtgttggggggctgggcgaagctgtgggtggagtgatcaaagaggggcccgttgacgagctcgaagaagcgatgggtgatgctggggagcagggccgggtccacctggtgtcgcaggagagacgctcgcatgaaccggtgcgcgtcgaacacgcccggcgccgagcggttgtcgatgaccgtgcccgcgcccgccgtcagggcgcagaagcgcgcgcgcgccgcaaagccgttggcgaccgcggcgaacgtcgcgggcagcacctcgccgtggacgctgacccgcagcatcttctcgagctccccgcgctgctcgcggacgcagcgccccaggctggccaacgaccgcttcgtcaggcggtccgcgtacaggcgccgtcgctcccgcacgtccgcggccgcttgcgtggcgatgtccccccacgtctcgggcccctgccccccgggcccgcggcgacggtcttcgtcctcgcccccgcccccgggagctcccaacccccgtgtcccttcctctacggcgacacggtccccgtcgtcgtcggggcccgcgccgcccttgggcgcgtccgccgcgccccccgcccccatgcgcgccagcacgcgacgcagcgcctcctcgtcgcactgttcggggctgacgaggcgccgcaagagcggcgtcgtcaggtggtggtcgtagcacgcgcggatgagcgcctcgatctgatcgtcgggtgacgtggcctgaccgccgattattagggcgtccaccatatccagcgccgccaggtggctcccgaacgcgcgatcgaaatgctccgcccgccgcccgaacagcgccagttccacggccaccgcggcggtctcctgctgcaactcgcgccgcgccagcgcggtcaggttgctggcaaacgcgtccatggtggtctggccggcgcggtcgccggacgcgagccagaatcgcaattcgctgatggcgtacaggccgggcgtggtggcctgaaacacgtcgtgcgcctccagcagggcgtcggcctccttgcggaccgagtcgttctcgggcgccgggtggggctgtccgtcgccccccgcggtcctggccagcgcatggtccaacacggagagcgcccgcgcgcggtcggcgtccgacagcccggcggcgtggggcaggtaccgccgcagctcgttggcgtccagccgcacctgcgcctgctgggtgacgtggttacagatacggtccgccaggcggcgggcgatcgtcgccccctggttcgccgtcacacacagttcctcgaaacagaccgcgcaggggtgggacgggtcgctaagctccggggggacgataaggcccgaccccaccgcccccaccataaactcccgaacgcactccagcgcggcggtggcgccgcgcgagggggtgatgaggtggcagtagtttagctgctttagaaagttctcgacgtcgtgcaggaaacacagctccatatggacggtcccgccatacgtatccagcctgacccgttggtgatacggacagggtcgggccaggcccatggtctcggtgaaaaacgccgcgacgtctcccgcggtcgcgaacgtctccaggctgcccaggagccgctcgccctcgcgccacgcgtactctagcagcaactccagggtgaccgacagcggggtgagaaaggccccggcctgggcctccaggcccggcctcagacgacgccgcagcgcccgcacctgaagcgcgttcagcttcagttgggggagcttcccccgtccgatgtgggggtcgcaccgccggagcagctctatctgaaacacataggtctgcacctgtccgagcagggctaacaacttttgccgggccacggtgggctcggacaccggggcggccatctcgcggcgccgatctgtcccgcggccggagtatgcggtggacgctaccctgcgtctggctgagccccggggtccccctcttcggggcggccttccgcgggcccgccgaccggcaagccgggggtcggcggcgcgtgcgtttctgttctattcccagacaccgcggagaggaatcacggcccgcccagagatatagacacggaccacaaacaagcacggatgtcgtagcaataatttattttacacacattccccgccccgccctaggttcccccaccccccaacccctcacagcatatccaacgtcaggtctccctttttgtcggggggcccctccccaaacgggtcatccccgtggaacgcccgtttgcggccggcaaatgccggtcccggggcccccgggccgccgaacggcgtcgcgttgtcgtcctcgcagccaaaatccccaaagttaaacacctccccggcgttgccgagttggctgactagggcctcggcctcgtgcgccacctccagggccgcgtccgtcgaccactcgccgttgccgcgctccagggcacgcgcggtcagctccatcatctcctcgcttaggtactcgtcctccaggagcgccagccagtcctcgatctgcagctgctgggtgcggggccccaggcttttcacggtcgccacgaacacgctactggcgacggccgccccgccctcggagataatgccccggagctgctcgcacagcgagctttcgtgcgctccgccgccgaggctcgaggccgcgcacacaaacccggcccggggacaggccaggacgaacttgcgggtgcggtcaaaaataaggagcgggcacgcgtttttgccgcccatcaggctggcccagttcccggcctgaaacacacggtcgttgccggccatgccgtagtatttgctgatgctcaaccccaacacgaccatggggcgcgccgccatgacgggccgcagcaggttgcagctggcgaacatggacgtccacgcgcccggatgcgcgtccacggcgtccatcagcgcgcgggccccggcctccaggcccgccccgccctgcgcggaccacgcggccgccgcctgcacgctggggggacggcgggaccccgcgatgatggccgtgagggtgttgatgaagtacgtcgagtgatcgcagtatcgcagaatctggtttgccatgtagtacatcgccagctcgctcacgttgttgggggccaggttaataaagtttatcgcgccgtagtccagggaaaactttttaatgaacgcgatggtctcgatgtcctcgcgcgacaggagccgggcgggaagctggttgcgttggagggccgtccagaaccactgcgggttcggctggttggaccccgggggcttgccgttggggaagatggccgcgtggaactgcttcagcagaaagcccagcggtccgaggaggatgtccacgcgcttgtcgggcttctggtaggcgctctggaggctggcgacccgcgccttggcggcctcggacgcgttggcgctcgcgcccgcgaacaacacgcggctcttgacgcgcagctccttgggaaaccccagggtcacgcgggcaacgtcgccctcgaagctgctctcggcgggggccgtctggccggccgtcaggctgggggcgcagatagccgcaccctccgagagcgcgaccgtcagcgttttggccgacagaaacccgttgttaaacatgtccatcacgcgccgccgcagcaccggttggaattgattgcgaaagttgcgcccctcgaccgactgcccggcgaacaccccgtggcactggctcagggccaggtcctggtacacggcgaggttggatcgccgcccgagaagctgaagcagggggcacggcccgcacgcgtacgggtccagcgtcagggacatggcgtggttggcctcgcccagaccgtcgcgaaacttgaagttcctcccctccaccaggttgcgcatcagctgctccacctcgcggtccacgacctgcctgacgttgttcaccaccgtatgcagggcctcgcggttggtgatgatggtctccagccgccccatggccgtggggaccgcctggtccacgtactgcagggtctcgagttcggccatgacgcgctcggtcgccgcgcggtacgtctcctgcatgatggtccgggcggtctcggatccgtccgcgcgcttcagggccgagaaggcggcgtagtttcccagcacgtcgcagtcgctgtacatgctgttcatggtcccgaagacgccgatggctccgcgggcggcgctggcgaacttgggatggcgcgcccggaggcgcatgagcgtcgtgtgtacgcaggcgtggcgcgtgtcgaaggtgcacaggttgcagggcacgtcggtctggttggagtccgcgacgtatcgaaacacgtccatctcctggcgcccgacgatcacgccgccgtcgcagcgctccaggtaaaacagcatcttggccagcagcgccggggaaaacccacacagcatggccaggtgctcgccggcaaattcctgggttccgccgacgaggggcgcggtgggccgaccctcgaacccgggcgccacgtgtccctcgcggtccacctgtgggttggccgccacgtgggtcccgggcacgaggaagaagcggtaaaaggagggtttgctgtggtcctttgggtccgccgggccggcgtcgtccacctcggtgagatggagggccgagttggtgctaaataccatggcccccacgagtcccgcggcgcgcgccaggtacgccccgacggcgttggcgcgggccgcggccgtgtcctggccctcgaacagcggccacgcggagatgtcggtgggcggctcgtcgaagacggccatcgacacgatagactcgagggccagggcggcgtctccggccatgacggaggccaggcgctgttcgaacccgcccgccgggcccttgccgccgccgtcgcgcccgccccgcggggtcttaccctggctggcttcgaaggccgtgaacgtaatgtcggcggggagggcggcaccctcgtggttttcgtcaaacgccaggtgggcggccgcgcgggccacggcgtccacgtttcggcatcgcagtgccacggcggcgggtcccacgaccgcctcgaacaggaggcggttgagggggcggttaaagaacggaagcgggtaggtaaaattctccccaatcgatcggtggttggcgttgaacggctctgcgatgacacggctaaaatccggcatgaacagctgcaacgggtacacgggtatgcggtgcacctccgccccgcctatggttaccttgtctgagcctcccaggtgcagaaaggtgttgttgatgcacacggcctccttgaagccctcggtaacgaccagatacaggagggcgcggtccgggtccaggccgaggcgctcacacagcgcctcccccgtcgtctcgtgtttgaggtcgccgggccggggggtgtagtccgaaaagccaaaatggcggcgtgcccgctcgcagagtcgcgtcaggttcggggcctgggtgctggggtccaggtgccggccgccgtgaaagacgtacacggacgagctgtagtgcgatggcgtcagtttcagggacaccgcggtacccccgagccccgtcgtgcgagaacccacgaccacggccacgttggcctcaaagccgctctccacggtcaggcccacgaccaggggcgccacggcgacgtcggcatcgccgctgcgcgccgacagtaacgccagaagctcgatgccttcggacggacacgcgcgagcgtacacgtatcccaggggcccgggggggaccttgatggtggttgccgtcttgggctttgtctccatgtccttctgtcaatcggtccgcgaacggaggtaatcccggcacgacgacggacgcccgacaaggtatgtctcccgagcgtcaaaatccggggggggggcggcgacggtcaaggggagggttggagaccggggttggggaatgaatccctacccttcaccgacaacccccgggtaatcacggggtgccgatgaaccccggcggccggcaacgcggggtccctgcgagaggcacagatgcttacggtcaggtgctccgggtcgggtgcgtctggtatgcggttggtatatgtacactttacctgggggcgtgccggtccgccccagcccctcccacgccccgcgcgtcatcagccggtgggcgtggccgctattataaaaaaagtgagaacgcgaagcgttcgcactttgtcctaataatatatatattattaggacaaagtgcgaacgcttcgcgttctcactttttttataatagcggccacgcccaccggctacgtcacgctcctgtcggccgccggcggtccataagcccggccggccgggccgacgcgaataaaccgggccgccggccggggcgccgcgcagcagctcgccgcccggatccgccagacaaacaaggctcttgcacatgccggcccgggcgagcctgggggtccggtaattttgccatcccacccaagcggctttttgggtttttctcttcccccctccccacatcccccctctttaggggttcgggtggtaacaaccgcgatgttttccggtggcggcggcccgctgtcccccggaggaaagtcggcggccagggcggcgtccgggttttttgcgcccgccggccctcgcggagccggccggggacccccgccttgcttgaggcaaaacttttacaacccctacctcgccccagtcgggacgcaacagaagccgaccgggccaacccagcgccatacgtactatagcgaatgcgatgaatttcgattcatcgccccgcgggtgctggacgaggatgcccccccggagaagcgcgccggggtgcacgacggtcacctcaagcgcgcccccaaggtgtactgcgggggggacgagcgcgacgtcctccgcgtcgggtcgggcggcttctggccgcggcgctcgcgcctgtggggcggcgtggaccacgccccggcggggttcaaccccaccgtcaccgtctttcacgtgtacgacatcctggagaacgtggagcacgcgtacggcatgcgcgcggcccagttccacgcgcggtttatggacgccatcacaccgacggggaccgtcatcacgctcctgggcctgactccggaaggccaccgggtggccgttcacgtttacggcacgcggcagtacttttacatgaacaaggaggaggtcgacaggcacctacaatgccgcgccccacgagatctctgcgagcgcatggccgcggccctgcgcgagtccccgggcgcgtcgttccgcggcatttccgcggaccacttcgaggcggaggtggtggagcgcaccgacgtgtactactacgagacgcgccccgctctgttttaccgcgtctacgtccgaagcgggcgcgtgctgtcgtacctgtgcgacaacttctgcccggccatcaagaagtacgagggtggggtcgacgccaccacccggttcatcctggacaaccccgggttcgtcaccttcggctggtaccgtctcaaaccgggccggaacaacacgctagcccagccgcgggccccgatggccttcgggacatccagcgacgtcgagtttaactgtacggcggacaacctggccatcgaggggggcatgagcgacctaccggcatacaagctcatgtgcttcgatatcgaatgcaaggcggggggggaggacgagctggcctttccggtggccgggcacccggaggacctggtcatccagatatcctgtctgctctacgacctgtccaccaccgccctggagcacgtcctcctgttttcgctcggttcctgcgacctccccgaatcccacctgaacgagctggcggccaggggcctgcccacgcccgtggttctggaattcgacagcgaattcgagatgctgttggccttcatgacccttgtgaaacagtacggccccgagttcgtgaccgggtacaacatcatcaacttcgactggcccttcttgctggccaagctgacggacatttacaaggtccccctggacgggtacggccgcatgaacggccggggcgtgtttcgcgtgtgggacataggccagagccacttccagaagcgcagcaagataaaggtgaacggcatggtgaacatcgacatgtacgggattataaccgacaagatcaagctctcgagctacaagctcaacgccgtggccgaagccgtcctgaaggacaagaagaaggacctgagctatcgcgacatccccgcctactacgccgccgggcccgcgcaacgcggggtgatcggcgagtactgcatacaggattccctgttggtgggccagcttttttttaagtttttgccccatctggagctctcggccgtcgcgcgcttggcgggtattaacatcacccgcaccatctacgacggccagcagatccgcgtctttacgtgcctgctgcgcctggccgaccagaagggctttattctgccggacatccaggggcgatttaggggcgccgggggggaggcgcccaagcgtccggccgcagcccgggaggacgaggagcggccagaggaggagggggaggacgaggacgaacgcgaggagggcgggggcgagcgggagccggagggcgcgcgggagaccgccggccggcacgtggggtaccagggggccagggtccttgaccccatttccgggtttcacgtgaaccccgtggtggtgttcgactttgccagcctgtaccccagcatcatccaggcccacaacctgtgcttcagcacgctctccctgagggccgacgcagtggcgcacctggaggcgggcaaggactacctggagatcgaggtgggggggcgacggctgttcttcgtcaaggctcacgtgcgagagagcctcctcagcatcctcctgcgggactggctcgccatgcgaaagcagatccgctcgcggattccccagagcagccccgaggaggccgtgctcctggacaagcagcaggccgccatcaaggtcgtgtgtaactcggtgtacgggttcacgggagtgcagcacggactcctgccgtgcctgcacgttgccgcgacggtgacgaccatcggccgcgagatgctgctcgcgacccgcgagtacgtccacgcgcgctgggcggccttcgaacagctcctggccgatttcccggaggcggccgacatgcgcgcccccgggccctattccatgcgcatcatctacggggacacggactccatatttgtgctgtgccgcggcctcacggccgccgggctgacggccatgggcgacaagatggcgagccacatctcgcgcgcgctgtttctgccccccatcaaactcgagtgcgaaaagacgttcaccaagctgctgctgatcgccaagaaaaagtacatcggcgtcatctacgggggtaagatgctcatcaagggcgtggatctggtgcgcaaaaacaactgcgcgtttatcaaccgcacctccagggccctggtcgacctgctgttttacgacgataccgtctccggagcggccgccgcgttagccgagcgccccgcggaggagtggctggcgcgacccctgcccgagggactgcaggcgttcggggccgtcctcgtagacgcccatcggcgcatcaccgacccggagagggacatccaggactttgtcctcaccgccgaactgagcagacacccgcgcgcgtacaccaacaagcgcctggcccacctgacggtgtattacaagctcatggcccgccgcgcgcaggtcccgtccatcaaggaccggatcccgtacgtgatcgtggcccagacccgcgaggtagaggagacggtcgcgcggctggccgccctccgcgagctagacgccgccgccccaggggacgagcccgccccccccgcggccctgccctccccggccaagcgcccccgggagacgccgtcgcctgccgaccccccgggaggcgcgtccaagccccgcaagctgctggtgtccgagctggccgaggatcccgcatacgccattgcccacggcgtcgccctgaacacggactattacttctcccacctgttgggggcggcgtgcgtgacattcaaggccctgtttgggaataacgccaagatcaccgagagtctgttaaaaaggtttattcccgaagtgtggcaccccccggacgacgtgaccgcgcggctccgggccgcagggttcggggcggtgggtgccggcgctacggcggaggaaactcgtcgaatgttgcatagagcctttgatactctagcatgagccccccgtcgaagctgatgtccctcattttacaataaatgtctgcggccgacacggtcggaatctccgcgtccgtgggtttctctgcgttgcgccggaccacgagcacaaacgtgctctgccacacgtgggcgacgaaccggtaccccgggcacgcggtgagcatccggtctatgagccggtagtgcaggtgggcggacgtgccgggaaagatgacgtacagcatgtggcccccgtaagtggggtccgggtaaaacaacagccgcgggtcgcacgccccgcctccgcgcaggatcgtgtggacgaaaaaaagctcgggctggccaagaatcccggccaagaggtcctggaggggggcgttgtggcggtcggccaacacgaccaaggaggccaggaaggcgcgatgctcgaatatcgtgttgatctgctgcacgaaggccaggattagggcctcgcggctggtggcggcgaaccgcccgtctcccgcgttgcacgcgggacagcaacccccgatgcctaggtagtagcccatcccggagagggtcaggcagttgtcggccacggtctggtccagacagaagggcagcgagacgggagtggtcttcaccaggggcaccgagagcgagcgcacgatggcgatctcctcggagggcgtctgggcgagggcggcgaaaaggccccgatagcgctggcgctcgtgtaaacacagctcctgtttgcgggcgtgaggcggcaggctcttccgggaggcccgacgcaccacgcccagagtcccgccggccgcagaggagcgcgaccgccagcgctccttgccgtgatagggcccgggccgggagccgcggcgatgggggtcggtgtcatacataggtacacagggtgtgctccagggacaggagcgagatcgagtggcgtctaagcagcgcgcccgcctcacggacaaatgtggcgagcgcggtgggctttggtacaaatacctgatacgtcttgaaggtgtagatgagggcacgcaacgctatgcagacacgcccctcgaactcgttcccgcaggccagcttggccttgtggagcagcagctcgtcgggatgggtggcggggggatggccgaacagaacccaggggtcaacctccatctccgtgatggcgcacatggggtcacagaacatgtgcttaaagatggcctcgggccccgcggcccgaagcaggctcacaaaccggcccccgtccccgggctgcgtctcggggtccgcctcgagctggtcgacgacgggtacgatacagtcgaagaggctcgtgttgttttccgagtagcggaccacggaggcccggagtctgcgcagggccagccagtaagcccgcaccagtaacaggttacacagcaggcattctccgccggtgcgcccgcgcccccggccgtgtttcagcacggtggccatcagagggcccaggtcaaggtcgggctgggcatcgggttcggtaaactgcgcaaagcgcggagccacgtcgcgcgtgcgtgccccgcgatgcgcttcccaggactggcggaccgtggcgcgacgggcctccgcggcagcgcgcagctggggccccgactcccagacggcgggggtgccggcgaggagcagcaggaccagatccgcgtacgcccacgtatccggcgactcctccggctcgcggtccccggcgaccgtctcgaattccccgttgcgagcggcggcgcgagtacagcagctgtccccgcccccgcgccgaccctccgtgcagtccaggagacgggcgcaatccttccagttcatcagcgcggtggtgagcgacggctgcgtgccggatcccgccgccgaccccgccccctcctcgcccccggaggccaaggttccgatgagggcccgggtggcagactgcgccaggaacgagtagttggagtactgcaccttggcggctcccggggagggcgagggcttgggttgcttctgggcatgccgcccgggcaccccgccgtcggtacggaagcagcagtggagaaaaaagtgccggtggatgtcgtttatggtgagggcaaagcgtgcgaaggagccgaccagggtcgccttcttggtgcgcagaaagtggcggtccatgacgtacacaaactcgaacgcggccacgaagatgctagcggcgcagtggggcgcccccaggcatttggcacagagaaacgcgtaatcggccacccactggggcgagaggcggtaggtttgcttgtacagctcgatgatgcggcagaccagacagggccggtccagcgcgaaggtgtcgatggccgccgcggaaaagggcccggtgtccaaaagcccctccccacagggatccgggggcgggttgcggggtcctccgcgcccgcccgaaccccctccgtcgcccgcccccccgcgggcccttgagggggcggtgaccacgtcggcggcgacgtcctcgtcgagcgtgccgacgggcggcacacctatcacgtgactggccgtcaggagctcggcgcagagagcctcgttaagagccaggaggctgggatcgaaggccacatacgcgcgctcgaacgcccccgccttccagctgctgccgggggactcttcgcacaccgcgacgctcgccaggaccccggggggcgaagttgccatggctgggctggaggggcgcacgcgccagcgaactttacgggacacaatccccgactgcgcgctgcggtcccagaccctggagagtctagacgcgcgctacgtctcgcgagacggcgcgcatgacgcggccgtctggttcgaggatatgacccccgccgagctggaggttgtcttcccgactacggacgccaagctgaactacctgtcgcggacgcagcggctggcctccctcctgacgtacgccgggcctataaaagcgcccgacgacgccgccgccccgcagaccccggacaccgcgtgtgtgcacggcgagctgctcgcccgcaagcgggaaagattcgcggcggtcattaaccggttcctggacctgcaccagattctgcggggctgacgcgcgcgctgttgggcgggacggttcgcgaaccctttggtgggtttacgcgggcacgcacgctcccatcgcgggcgccatggcgggactgggcaagccctataccggccacccaggtgacgccttcgagggtctcgttcagcgaattcggcttatcgtcccatctacgttgcggggcggggacggggaggcgggcccctactctccctccagcctcccctccaggtgcgcctttcagtttcatggccatgacgggtccgacgagtcgtttcccatcgagtatgtactgcggcttatgaacgactgggccgaggtcccgtgcaacccttacctgcgcatacagaacaccggcgtgtcggtgctgtttcaggggttttttcatcgcccacacaacgcccccgggggcgcgattacgccagagcggaccaatgtgatcctggggtccaccgagacgacggggctgtccctcggcgacctggacaccatcaaggggcggctcggcctggatgcccggccgatgatggccagcatgtggatcagctgctttgtgcgcatgccccgcgtgcagctcgcgtttcggttcatgggccccgaagatgccggacggacgagacggatcctgtgccgcgccgccgagcaggctattacccgtcgccgccgaacccggcggtcccgggaggcgtacggggccgaggccgggctgggggtggctggaacgggtttccgggccaggggggacggttttggcccgctccccttgttaacccaagggccctcccgaccgtggcaccaggccctgcggggtcttaagcacctacggtttggccccgccgcgctcgttttggcggcgggactcgtcctgggggccgctatttggtgggtggttggtgctggcgcgcgcctataaaaaaggacgcaccgccgccctaatcgccagtgcgttccggacgccttcgccccacacagccctcccgaccgacacccccatatcgcttcccgacctccggtcccgatggccgtcccgcaatttcaccgccccagcaccgttaccaccgatagcgtccgggcgcttggcatgcgcgggctcgtcttggccaccaataactctcagtttatcatggataacaaccacccgcacccccagggcacccaaggggccgtgcgggagtttctccgcggtcaggcggcggcgctgacggaccttggtctggcccacgcaaacaacacgtttaccccgcagcctatgttcgcgggcgacgccccggccgcttggttgcggcccgcgtttggcctgcggcgcacctattcaccgtttgtcgttcgagaaccttcgacgcccgggaccccgtgaggcccggggagttccttttggggtgttttaatcaataaaagaccacaccaacacacgagccttgcgtttaatgtcgtgtttattcaagggagtgggacagggttcgacggttcgaaacttaacacaccaaacaatcgagcgcgtctagcccagtaacatgcgcacgtgatgtaggctggtcagcacggcgtcgctgtgatgaagcagcgcccggcgggtccgctgtaactgctgttgtaggcggtaacaggcgcggatcagcaccgccagggcgctacgaccggtgcgttgcacgtagcgtcgcgacagaactgcgtttgccgatacgggcggggggccgaattgtaagcgcgtcacctcttgggagtcatcggcggataacgcactgaatggttcgttggttatgggggagtgtggttccccagggagtgggtcgagcgcctcggcctcggaatccgagaggaacaacgaggtggcgtcggagtattcgtcgtcagagacatacagggtctgaagcagcgacacgggcgggggggtagcgtcgatgtgtagcgcgagggaggatgcccacgaagacaccccagacaaggagctgcccgtgcgtggatttgtggaagacgcggaagccgggacggatgggcggttttgcggtgcccggaaccgaaccgcaggatactccccgggtgctacatgcccgttttggggctggggttggggctggggttggggctggggttggggctggggttggggctggggttggggctggggctggggttggggctggggttggggctggggctggggttggggctggggttggggctggggttggggctggggttggggttggggctggggttggggctggggctggggctggggcgcggacaggcggctgacggtcaaatgcccccgggggcgcgcagatgtggtgggcgtggccaccggctgccgtgtagtggggcggcgggaaaccgggcctccgggcgtaacaccgccctccagcgtcaagtatgtggggggcgggcctgacgtcgggggcggggcgacgggttggaccgcgggaggcgggggagagggacctgcgggagaggatgaggtcggctcggccgggttgcggcctaaaacaggggccgtggggtcggcggggtcccagggtgaagggagggattcccgcgattcggacagcgacgcgacagcggggcgcgtaaggcgccgctgcggcccgcctacgggaaccctggggggggttggcgcgggacccgaggttagcggggggcggcggttttcgcccccgggcaaaaccgtgccggttgcaaccgggggcggaacgggatcgatagggagagcgggagaagcctggccggcggcctggggcccgagcgggaggggcacaccagacaccaaagcgtggggcgctggctctgggggtttgggaggggccggggggcgcgcgaaatcggtaaccggggcgaccgtgtcggggagggcaggcggccgccaaccctgggtggtcgcggaagcctgggtggcgcgcgccagggagcgtgcccggcggtgtcggcgcgcgcgcgacccggacgaagaagcggcagaagcgcgggaggaggcggggggccggggggcggtggcatcggggggcgccggggaactttggggggacggcaagcgccggaagtcgtcgcgggggcccacgggcgccggccgcgtgctttcggccgggacgcccggtcgtgcttcgcgagccgtgactgccggcccagggggccgcggtgcacactgggacgtggggacggactgatcggcggtgggcgaaagggggtccggggcaaggaggggcgcggggccgccggagtcgtcagacgcgagctcctccaggccgtgaatccatgcccacatgcgaggggggacgggctcgccgggggtggcgtcggtgaatagcgtgggggccaggcttccgggccccaacgagccctccgccccaacaaggtccacagggccgggggtcgggttcgggaccgaggggctctggtcgtcgggggcgcgctggtacaccggatgccccgggaatagctcccccgacaggagggaggcgtcgaacggccgcccgaggatagctcgcgcgaggaaggggtcctcgtcggtggcgctggcggcgaggacgtcctcgccgcccgccacaaacgggagctcctcggtggcctcgctgccaacaaaccgcacgtcgggggggccgggggggtccgggttttcccacaacaccgcgaccggggtcatggagatgtccacgagcaccagacacggcgggccccgggcgaggggccgctcggcgatgagcgcggacaggcgcgggagctgtgccgccagacacgcgttttcgatcgggttcaggtcggcgtgcaggaggcggacggcccacgtctcgatgtcggacgacacggcatcacgcaaggcggcgtccggcccgcgagcgcgtgagtcaaacagcgtgagacacagctccagctccgactcgcgggaaaaggccgtggtgttgcggagcgccacgacgacgggcgcgcccaggagcactgccgccagcaccaggtccatggccgtaacgcgcgccgcgggggtgcggtgggtggcggcggccggcacggtgacgtgctggcccgtgggccggtagagggcgttggggggagcggggggtgacgcctcgcgcccccccgaggggctcagcgtctgcccagattccagacgcgcggtcagaagggcgtcgaaactgtcatactctgtgtagtcgtccggaaacatgcaggtccaaagagcggccagcgcggtgcttgggagacacatgcgcccgaggacgctcaccgccgccagcgcctgggtgggactcagctttcccagcgcggcgccgcgctcggttcccagctcggggaccgagcgccagggcgccagggggtcggtttcggacaacttgccgcggcgccagtctgccagccgcgtgccgaacatgaggccccgggtcggagggcctccggccgaaaacgctggcagcacgcggatgcgggcgtctggatgcggggtcaggcgctgcacgaatagcatggaatctgctgcgttctgaaacgcacgggggagggtgagatgcatgtactcgtgttggcggaccagatccaggcgccaaaaggtgtaaatgtgttccggggagctggccaccagcgccaccagcacgtcgttctcgttaaaggaaacgcggtgcctagtggagctctggggtccgagcggcggccccggggccgccgcgtcacccccccattccagctgggcccagcgacacccaaactcgcgcgtgagagtggtcgcgacgagggcgacgtagagctcggccgccgcatccatcgaggccccccatctcgcctggcggtggcgcacaaagcgtccgaagagctgaaagttggcggcctgggcgtcgctgagggccagctgaagccggttgatgacggtgaggacgtacatggccgtgacggtcgaggccgactccagggtgtccgtcggaagcggggggcgaatgcatgccacctcgggacacatcagcagcgcgccgagcttgtcggtcacggccgggaagcagagcgcgtactgcagtggcgttccatccgggaccaaaaagctgggggcgaacggccgatccagcgtactggtggcctcgcgcagcaccaggggccccgggcctccgctcactcgcaggtacgcctcgccccggcggcgcagcatctgcgggtcggcctcttggccgggtggggcggacgcccgggcgcgggcgtctagggcgcgaagatccacgagcaggggcgcgggcgcggccgccgcgcccgcgcccgtctggcctgtggccttggcgtacgcgctatataagcccatgcggcgttggatgagctcccgcgcgccccggaactcctccatcgcccatggggccaggtccccggccaccgcgtcgaattccgccaacaggccccccagggtgtcaaagttcatctcccaggccacccttggcaccacctcgtcccgcagccgggcgctcaggtcggcgtgttgggccacgcgccccccgagctcctccacggccccggcccgctcggcgctcttggcgcccaggacgccctggtacttggcgggaaggcgctcgtagtcccgctgggctcgcagccccgacacagtgttggtggtgtcctgcagggcgcgaagctgctcgcatgccgcgcgaaatccctcgggcgatttccaggcccccccgcgaacgcggccgaagcgaccccatacctcgtcccactccgcctcggcctcctcgagagacctccgcagggcctcgacgcggcgacgggtgtcgaagagcgcctgcaggcgcgcgccctgtcgcgtcaggaggcccgggccgtcgctgctggccgcgcttagcgggtgcgtctcaaaggtacgctgggcatgttccaaccaggcgaccgcctgcacgtcgagctcgcgcgccttctccgtctggtccaacagaatttcgacctgatccgcgatctcctccgccgagcgcgcctggtccagcgtcttggccacggtcgccgggacggcgaccaccttcagcagggtcttcagattggccagaccctcggcctcgagctgggcccggcgctcgcgcgcggccagcacctcccgcagccccgccgtgacccgctcggtggcttcggcgcgctgctgtttggcgcgcaccacggcgtccttggtatcggccaggtcctgtcgggtcacgaatgcgacgtagtcggcgtacgccgtgtccttcacggggctctggtccacgcgctccagcgccgccacgcacgccaccagcgcgtcctcgctcgggcagggcagggtgacccctgcccggacaagctcggcggccgccgccgggtcgttgcgcaccgcggatatctcctccgcggcggcggccaggtccagcgccacgcttccgatcgcgcgccgcgcgtcggcccggagggcgtccaggcgatcgcggatatccacgtactcggcgtagcccttttgaaaaaacggcacgtactggcgcagggccggcacgccccccaagtcttccgacaggtgtaggacggcctcgtggtagtcgataaacccgtcgttcgcctgggcccgctccagcagcccccccgcgagccgcagaagccgcgccaggggctcggtgtccacccgaaacatgtcggcgtacgtgtcggccgcggccccgaaggccgcgctccagtcgatgcggtgaatggctgcgagcggggggagcatggggtggcgctggttctcgggggtgtatgggttaaacgcaagggccgtctccagggcaagggtcaccgccttggcgttggttcccagcgcctgctcggcccgctttcggaagtcccgggggttgtagccgtgcgtgcccgccagcgcctgcaggcgacggagctcgaccacgtcaaactcggcaccgctttccacgcggtccagcacggcctccacgtcggcggcccagcgctcgtggctactgcgggcgcgctgggccgccatcttctctctgaggtcggcggtggcggcctcaagttcgtcggcgcggcgtcgcgtggcgccgatgacctttcccagctcctgcagggcgcgcccgctgggggagtggtccccggccgtcccttcggcgtgcaacaggcccccgaacctgccctcgtggcccgcgaggctttcccgcgcgccggtggtcgcgcgcgtcgcggcctggatcagggaggcatgctctccctccggttggttggcggcccggcgcacctggacgacaaggtcggctgccgccgaccctaaggtcgtgagctgggcgatggccccccgcgcgtccagggccaaccgagtcgccttgacgtatcccgcggcgctgtcggccatggccgctaggaaggccaggggggaggccgggtcgctggcggccgcgcccagggccgtcaccgcgtcgaccaggacgcggtgcgcccgcacggccgcatccaccgtcgacgcggggtctgccgtcgcgacggcggcgctgccggcgttgatggcgttcgagacggcgtgggctatgatcggggcgtgatcggcgaagaactgcaagagaaacggagtctcgggggcgttggcgaacaggttcttcagcaccaccacgaagctgggatgcaagccggacagagccgtcgccgtgtccggagtcgggtgctccagggcatctcggtactgccccagcagcccccacatgtccgcccgcagcgccgccgtaacctcagggggcgccccccgaacggcctcggggaggtccgaccagcccgccggcagggaggcccgcagggtcgccaggacggccggacaggcctttagccccacaaagtcagggagggggcgcaggaccccctggagtttgtgcaagaacttctcccgggcgtcgcgggccaccttcgcccgctcccgcgctccctcgagcattgcctccagggagcgcgcgcgctcccgcaaacgggcacgcgcatcgggggcgagctcggccgtcagcttggcggcatccatggcccgcgcctgccgcagcgcttcctcggccatgcgcgtggcctctggcgacagcccgccgtcgtcggggtagggcgacgcgccgggcgcaggaacaaaggccgcgtcgctgtccagctgctggcccagggccgcatctagggcgtcgaaacgccgcagctcggccagacccgagctgcggcgcgcctgctggtcgttaatgtcgcggatgctgcgcgccagctcgtccagcggcttgcgttctatcagcccttgggtggcggcgtccgtcaggacggagagccaggccgccaggtcctcgggggcgtccagcgtctggccccgctggatcagatcccgcaacaggatggccgtggggctggtcgcgatcgggggcggggcgggaatgacggcgcgctgcgcgatgtcccgcgtgtgctggtcgaagacaggcagggactcgagcagctggaccacgggcacgacggcggccgaagccacgtgaaaccggcggtcgttgttgtcgctggcctgcagagccttggcgctgtatacggccccccggtaaaagtactccttaaccgcgccctcgatcgcccgacgggcctgggtccgcacctcctccagccgaacctgaacggcctcggggcccagggggggtgggcgcggagccccctgcggggccgccccggccggggcgggcattacgccgaggggcccggcgtgctgtgagaccgcgtcgaccccgcgagcgagggcgtcgagggcctcgcgcatctggcgatcctccgcctccaccctaatctcttcgccacgggcaaatttggccagagcctggactctatacagaagcggttctgggtgcgtcggggtggcgggggcaaaaagggtgtccgggtgggcctgcgagcgctccagaagccactcgccgaggcgtgtatacagattggccggcggggccgcgcgaagctgcagctccaggtccgcgagttccccgtaaaaggcgtccgtctcccgaatgacatccctagccacaaggatcagcttcgccagcgccaggcgaccgatcagagagttttcgtccagcacgtgctggacgaggggcagatgggcggccacgtcggccaggctcaggcgcgtggaggccagaaagtcccccacggccgttttccggggcagcatgctcagggtaaactccagcagggcggcggccgggccggccaccccggcctgggtgtgcgtccgggccccgttctcgatgagaaaggcgaggacgcgttcaaagaaaaaaataacacagagctccagcagccccggagaagccggatacggcgaccgtaaggcgctgatggtgagccgcgaacacgcggcgacctcgcgggccagggcggcggagcacgcggtgaacttaaccgccgtggcggccacgtttgggtgggcctcgaacagctgggcgaggtctgcgcccgggggctcgggtgagcggcgagtcttcagcgcctcgagggcctgtgaggacgccggaaccgtgggcccgtcgtcctcgcccgcctcggcgaccggcggcccggccgggtcggggggtgccgaggcgaggacaggctccggaacggaggcggggaccgcggccccgacgggggttttgcctttgggggtggatttcttcttggttttggcagggggggccgagcgtttcgttttctcccccgaagtcaggtcttcgacgctggaaggcggagtccaggtgggtcggcggcgcttgggaaggccggccgagtagcgtgcccggtgccgaccaaccgggacgacgcccatctccaggacccgcatgtcgtcgtcatcttcttcggccgcctctgcggcgggggtcttgggggcggagggaggcggtggtgggatcgcggagggtgggtcggcggaggggggatccgtgggtggggtacccttcagggccaccgcccatacatcgtcgggcgcccgattcgggcgcttggcctctggttttgccgacggaccggccgtcccccgggatgtctcggaggccctgtcgtcgcgacgggcccgggtcggtggcggcgactgggcggctgtgggcgggtgtggccccgtgccccctaccccctcccgggggcccacgccgacgcagggctcccccaggcccgcgatctcgccccgcagggggtgcgtgatggccacgcgccgttcgctgaacgcttcgtcctgcaggtaagtctcgctggccccataaagatgcagagccgcggccgtcaagtccgcaggagccgcgggttccgggcccgacggcacgaaaaacaccatggctcccgcccaccgtacgtccgggcgattgcgggtgtaatacgtcaggtatggatacatgtcccccgcccgcactttggtgatgaacgcgggggtgccctccggaaggccgtgcgggtcaaaaaggtatgcggtgtcgccgtccctgaacagccccatccctagggggccaatggttaggagcgtgtacgacagggggcgcagggcccacgggccggcgaagaacgtgtgtgcggggcattgtgtctccagcaggcccgccgcgggctccccgaagaagcccacctcgccgtatacgcgcgagaagacacagcgcagtccgccgcgcgcccctgggtactcgaggaagttggggagctcgacgatcgaacacatgcgcggcggcccagggcccgcggtcgcgcgcgtccactcgcccccctcgaccaaacatccctcgatggcctccgcggacagaacgtcgcgagggcccacatcaaatatgaggctgagaaaggacagcgacgagcgcatgcacgataccgacccccccggctccaggtcgggcgcgaactggttccgagcaccggtgaccacgatgtcgcgatcccccccgcgttccatcgtggagtgcggtggggtgcccgcgatcatatgtgccctgctggccagagacccggcctgtttatggaccggacccccggggttagtgttgtttccgccacccatgcccccgtaccatggccccggttcccctgattaggctacgagtcgcggtgatcgcttcccaaaaaccgagctgcgtttgtctgtcttggtcttccaccccccccagcccgcacaccataacaccgagaacaacacacgggggtgggcggaacataataaagctttattggtaactagttaacggcaagtccgtgggtggcgcgacggtgtcctccgggctcatctcgtcgtcctcgacgggggtgttggaatgaggcgccccctcgcggtccgcctggcgtgggccgtgcccataggcctccggcttctgtgcgtccatgggcataggcgcggggagactgtttccggcgtcgcggacctccaggtccctgggagactccggtccggctaacggacgaaacgcggaagcgcgaaacacgccgtcggtgacccgcaggagctcgttcatcagtaaccaatccatactcagcgtaacggccagcccctggcgagacagatccacggagtccggaaccgcggtcgtctggcccagggggccgaggctgtagtccccccaggcccctaggtcgcgacggctcgtaagcacgacgcggtcggccgcggggctttgcgggggggcgtcctcgggcgcatgcgccattacctctcggatggccgcggcgcgctggtcggccgagctgaccaagggcgccacgaccacggcgcgctccgtctgcaggcccttccacgtgtcgtggagttcctggacaaactcggccacgggctcgggtcccgcggccgcatgcgcggcttgatagcaggccgacagacgccgccagcgcgctagaaactgacccatgaaacaaaacccagggacctggtctcccgacagcagcttcgacgcccgggcgtgaatgccggaaacgacggacagaaacccgtgaatttcgcgccggaccacggccagcacgttgtcctcgtgcgacacctgggccgccagctcgtcgcacacccccaggtgcgccgtggtttcggtgatgatggaacgcaggctcgcgagggacgcgaccagcgcgcgcttggcgtcgtgatacatgctgcagtactgactcaccgcgtcccccatggcctcggggggccagggccccaggcggtcgggcgtgtccccgaccaccgcatacaggcggcgcccgtcgctctcgaaccgacactcgaaaaaggcggagagcgtgcgcatgtgcagccgcagcagcacgatggcgtcctccagttggcgaatcagggggtctgcgcgctcggcgaggtcctgcagcaccccccgggcggccagggcgtacatgctaatcaacaggaggctggtgcccacctcggggggcggggggggctgcagctggaccaggggccgcagctgctcgacggcacccctggagatcacgtacagctcccggagcagctgctctatgttgtcggccatctgcatagtggggccgaggccgccccgggcggccggttcgaggagggtgatcagcgcgcccagtttggtgcgatggccctcaaccgtggggagatagcccagcccaaagtcccgggcccaggccaacacacgcagggcgaactcgaccgggcggggaaggtaggccgcgctacacgtggccctcagcgcgtccccgaccaccagggccagaacgtaggggacgaagcccgggtcggcgaggacgttggggtgaatgccctcgagggcggggaagcggatctgggtcgccgcggccaggtggacagagggggcgtggctgggctgcccgacggggagaagcgcggacagcggcgtggccggggtggtgggggtgatgtcccagtgggtctgaccatacacgtcgatccagatgagcgccgtctcgcggagaaggctgggttgaccggaactaaagcggcgctcggccgtctcaaactcccccacgagcgcccgccgcaggctcgccagatgttccgtcggcacggccggacccatgatacgcgccagcgtctggcttagaacgccccccgacaggccgaccgcctcgcagagccgcccgtgcgtgtgctcgctggcgccctggacccgcctgaaagtttttacgtagttggcatagtacccgtattcccgcgccaacccaaacacgttcgaccccgcgagggcaatgcacccaaagagctgctggacttcgccgagtccgtggccggtgggcgtccgcgcggggacgcccgccgccagaaacccctccagggccgaaaggtagtgcgtgcagtgcgagggcgtgaacccagcgtcgatcagggtgttgatcaccacggagggcgaattggtattctggatcaacgtccacgtctgctgcagcagagccagcagccgctgctgggcgccggtggagggctgctccccgagctgcagcaggctggagacggcaggctggaagactgccagtgccgacgaactcaggaacggcacgtcgggatcaaacacggccacgtccgtccgcacgcgcgccattagcgtccccgggggcgcacaggccgagcgcgggctgacgcggctgagggccgtcgacacgcgcacctcctcgcggctgcgaaccatcttgttggcctccagtggcggaatcattatggccgggtctatctcccgcacggtgtgctgaaactgcgccaacaggggcggcgggaccacagccccccgctcgggggtcgtcaggtactcgtccaccagggccaacgtaaagagggcccgtgtgaggggagtgagggtcgcgtcgtctatgcgctggaggtgcgccgagaacagcgtcacccgattactcaccagggccaagaaccggaggccctcttgcacgaacagggcggggaagagcaggctgtacgccggggtggtaaggttcgcgctgggctgccccaacgggaccggcgccatcttgagtgacgtctccccaagggcctcgatggaggtccgcgggctcatggccaagcagctcttggtgacggtttgccagcggtctatccactccacggcgcactggcggacgcggaccggccccagggccgccgcggtgcgcaggccggcggaatccagcgcatgggacgtgtcggagccggtgaccgcgaggatggtgtccttgatgacctccatctcccggaaggcctggtcgggggcctcggggagagccaccaccaagcggtgtacgagcaacccggggaggttctcggccaagagcgccgtctccggaagcccgtgggcccggtggagcgcgcacaggtgttccagcagcggccgccagcatgcccgcgcgtctgccggggcgatggccgttcccgacaacagaaacgccgccatggcggcgcgcagcttggccgtggccagaaacgccgggtcgtccgccccgtttgccgtctcggccgtgggggttggcggttggcgaaggccggctaggctcgccaataggcgctgcataggtccgtccgagggcggaccggcgggtgaggtcgtgacgacgggggcctcggacgggagaccgcggtctgccatgacgcccggctcgcgtgggtgggggacagcgtagaccaacgacgagaccgggcgggaatgactgtcgtgcgttgtagggagcggcgaattatcgatcccccgcggccctccaggaaccccgcaggcgttgcgagtaccccgcgtcttcgcggggtgttatacggccacttaagtcccggcatcccgttcgcggacccaggcccgggggattgtccggatgtgcgggcagcccggacggcgtgggttgcggactttctgcggggcggcccaaatggccctttaaacgtgtgtatacggacgcgccgggccagtcggccaacacaacccaccggaggcggtagccgcgtttggctgtggggtgggtggttccgccttgcgtgagtgtcctttcgacccccccccctcccccgggtcttgttaggtcgcgatctgcagtcgcaatgaagaccaatccgctacccgcaaccccttccgtgtggggcgggagtaccgtggaactcccccccaccacacgcgataccgcgggacagggcctgcttcggcgcgtcctgcgccccccgatctctcgccgcgacggcccagggctccccagggggtcgggaccccggagggcggccagcacgctgtggttgcttggcctggacggcacagacgcgccccctggggcgctgacccccaacgacgataccgaacaggccatggacaagatcctgcggggcaccatgcgcgggggggcggccatgatcggctccccgcgccatcatctaacccgtcaagtgatcctgacggatctgtgccaacccaacgcggatcgtgccgggacgctgcttctggcgctgcggcaccccgccgacctgcctcacctggcccaccagcgcgccccgccaggccggcagaccgagcggctgggcgaggcctggggccagctgatggaggcgaccgccctggggtcggggcgagccgagagcgggtgcacgcgcgcgggcctagtgtcgtttaacttcctggtggcggcgtgtgccgcctcgtacgacgcgcgcgacgccgccgatgcggtacgggcccacgtcacggccaactaccgcggaacgcgggtgggggcgcgcctggatcgtttttccgagtgtctgcgcgccatggttcacacgcacgtcttcccccacgaggtcatgcggtttttcggggggctggtgtcgtgggtcacccaggacgagctagcgagcgtcaccgccgtgtgcgccgggccccaggaggcggcgcacaccggccacccgggccggccccgctcggccgtgatcctcccggtgtgtgcgttcgtggacctggacgccgagctggggctggggggcccgggcgcggcgtttctgtacctggtattcacttaccgccagcgccgggaccaggagctgtgttgtgtgtacgtgatcaagagccagctccccccgcgcgggttggagccggccctggagcggctgtttgggcgcctccggatcaccaacacgattcacggcaccgaggatatgacgcccccggccccaaaccgaaaccccgacttccccctcgcgggcctggccgccaatccccaaaccccgcgttgctcggctggccaggtcacgaacccccagttcgccgacaggctgtaccgctggcagccggaccttcgggggcgccccaccgcacgcacctgtacgtacgccgcctttgcagagctcggcatgatgcccgaggatagtccccgctgcctgcaccgcaccgagcgctttggggcggtcagcgtccccgttgtcatcctggaaggcgtggtgtggcgccccggcgagtggcgggcatgcgcgtgagcgtagcaaacgccccgcccacacaacgctccgcccccaaccccttccccgctgtcactcgtggttcgttgacccggacgtccgccaaataaagccactgaaacccgaaacgcgagtgttgtaacgtcctttgggcgggaggaagccacaaaatgcaaatgggatacatggaaggaacacacccccgtgactcaggacatcggcgtgtccttttgggtttcactgaaactggcccgcgccccacccctgcgcgatgtggataaaaagccagcgcgggtggtttagggtaccacaggtgggtgctttggaaacttgtcggtcgccgtgctcctgtgagcttgcgtccctccccggtttcctttgcgctcccgccttccggacctgctctcgcctatcttctttggctctcggtgcgattcgtcaggcagcggccttgtcgaatctcgaccccaccactcgccggacccgccgacgtcccctctcgagcccaccgaaacccgccgcgtctgttgaaatggccagccgcccagccgcatcctctcccgtcgaagcgcgggccccggttgggggacaggaggccggcggccccagcgcagccacccagggggaggccgccggggcccctctcgcccacggccaccacgtgtactgccagcgagtcaatggcgtgatggtgctttccgacaagacgcccgggtccgcgtcctaccgcatcagcgatagcaactttgtccaatgtggttccaactgcaccatgatcatcgacggagacgtggtgcgcgggcgcccccaggacccgggggccgcggcatcccccgctcccttcgttgcggtgacaaacatcggagccggcagcgacggcgggaccgccgtcgtggcattcgggggaaccccacgtcgctcggcggggacgtctaccggtacccagacggccgacgtccccaccgaggcccttgggggcccccctcctcctccccgcttcaccctgggtggcggctgttgttcctgtcgcgacacacggcgccgctctgcggtattcgggggggagggggatccagtcggccccgcggagttcgtctcggacgaccggtcgtccgattccgactcggatgactcggaggacacggactcggagacgctgtcacacgcctcctcggacgtgtccggcggggccacgtacgacgacgcccttgactccgattcgtcatcggatgactccctgcagatagatggccccgtgtgtcgcccgtggagcaatgacaccgcgcccctggatgtttgccccgggacccccggcccgggcgccgacgccggtggtccctcagcggtagacccacacgcgccgacgccagaggccggcgctggtcttgcggccgatcccgccgtggcccgggacgacgcggaggggctttcggacccccggccacgtctgggaacgggcacggcctaccccgtccccctggaactcacgcccgagaacgcggaggccgtggcgcgctttctgggagatgccgtgaaccgcgaacccgcgctcatgctggagtacttttgccggtgcgcccgcgaggaaaccaagcgtgtcccccccaggacattcggcagcccccctcgcctcacggaggacgactttgggcttctcaactacgcgctcgtggagatgcagcgcctgtgtctggacgttcctccggtcccgccgaacgcatacatgccctattatctcagggagtatgtgacgcggctggtcaacgggttcaagccgctggtgagccggtccgctcgcctttaccgcatcctgggggttctggtgcacctgcggatccggacccgggaggcctcctttgaggagtggctgcgatccaaggaagtggccctggattttggcctgacggaaaggcttcgcgagcacgaagcccagctggtgatcctggcccaggctctggaccattacgactgtctgatccacagcacaccgcacacgctggtcgagcgggggctgcaatcggccctgaagtatgaggagttttacctaaagcgttttggcgggcactacatggagtccgtcttccagatgtacacccgcatcgccggctttttggcctgccgggccacgcgcggcatgcgccacatcgccctggggcgagaggggtcgtggtgggaaatgttcaagttctttttccaccgcctctacgaccaccagatcgtaccgtcgacccccgccatgctgaacctggggacccgcaactactacacctccagctgctacctggtaaacccccaggccaccacaaacaaggcgaccctgcggtccatcaccagcaacgtcagtgccatcctcgcccgcaacgggggcatcgggctatgcgtgcaggcgtttaacgactccggccccgggaccgccagcgtcatgcccgccctcaaggtccttgactcgctggtggcggcgcacaacaaagagagcgcgcgtccgaccggcgcgtgcgtgtacctggagccgtggcacaccgacgtgcgggccgtgctccggatgaagggggtcctcgccggcgaagaggcccagcgctgcgacaatatcttcagcgccctctggatgccagacctgtttttcaagcgcctgattcgccacctggacggcgagaagaacgtcacatggaccctgttcgaccgggacaccagcatgtcgctcgccgactttcacggggaggagttcgagaagctctaccagcacctcgaggtcatggggttcggcgagcagatacccatccaggagctggcctatggcattgtgcgcagcgcggccacgaccgggagccccttcgtcatgttcaaagacgcggtgaaccgccactacatctacgacacccagggggcggccatcgccggctccaacctctgcaccgagatcgtccatccggcctccaagcgatccagtggggtctgcaacctgggaagcgtgaatctggcccgatgcgtctccaggcagacgtttgactttgggcggctccgcgacgccgtgcaggcgtgcgtgctgatggtgaacatcatgatcgacagcacgctacaacccacgccccagtgcacccgcggcaacgacaacctgcggtccatgggaatcggcatgcagggcctgcacacggcctgcctgaagctggggctggatctggagtctgccgaatttcaggacctgaacaaacacatcgccgaggtgatgctgctgtcggcgatgaagaccagcaacgcgctgtgcgttcgcggggcccgtcccttcaaccactttaagcgcagcatgtatcgcgccggccgctttcactgggagcgctttccggacgcccggccgcggtacgagggcgagtgggagatgctacgccagagcatgatgaaacacggcctgcgcaacagccagtttgtcgcgctgatgcccaccgccgcctcggcgcagatctcggacgtcagcgagggctttgcccccctgttcaccaacctgttcagcaaggtgacccgggacggcgagacgctgcgccccaacacgctcctgctaaaggaactggaaagcacgtttagcgggaagcgcctcctggaggtgatggacagtctcgacgccaagcagtggtccgtggcgcaggcgctcccgtgcctggagcccacccaccccctccggcgattcaagaccgcgtttgactacgaccagaagttgctgatcgacctgtgtgcggaccgcgccccctacgtcgaccatagccaatccatgaccctgtatgtcacggagaaggcggacgggaccctcccagcctccaccctggtccgccttctggtccacgcatataagcgcggactaaaaacagggatgtactactgcaaggttcgcaaggcgaccaacagcggggtctttggcggcgacgacaacattgtctgcacgagctgcgcgctgtgaccgacaaaccccctccgcgccaggcccgccaccactgtcgtcgccgtcccacgcgctcccccgctgccatggattccgcagccccagccctctcccccgctctgacggcccatacgggccatagcgcgacggcggacctggcgatccagattccaaagtgccccgaccccgagaggtacttctacacctcccagtgtcccgacattaaccacctgcgctccctcagcatccttaaccgctggctggaaaccgagcttgttttcgtgggggacgaggaggacgtctccaagctttccgagggcgagctcagcttttaccgcttcctcttcgctttcctgtcggccgccgacgacctggttacggaaaacctgggcggcctctccggcctgtttgagcagaaggacattctccactactacgtggagcaggaatgcatcgaagtcgtacactcgcgcgtgtacaacatcatccagctggtgcttttccacaacaacgaccaggcgcgccgcgagtacgtggccggcaccatcaaccacccggccatccgcgccaaggtggactggctggaagcgcgggtgcgggaatgcgcctccgttccggaaaagttcattctcatgatcctcatcgagggcatcttttttgccgcctcgtttgccgccatcgcctaccttcgcaccaacaaccttctgcgggtcacctgccagtcaaacgacctcatcagccgggacgaggccgtgcacacgacggcctcgtgttacatctacaacaactacctcggcgggcatgccaagcccccgcccgaccgcgtgtacgggctgttccgccaggcggtcgagatcgagatcggatttatccgatcccaggcgccgacggacagccatatcctgagcccggcggcgctggcggccatcgaaaactacgtgcgattcagcgcggatcgcctgttgggccttatccacatgaagccactgttttccgccccaccccccgacgccagctttccgctgagcctcatgtccaccgacaaacacaccaattttttcgagtgtcgcagcacctcctacgccggggcggtcgtcaacgatctgtgagtgtcgcggcgcgcttctacccgtgtttgcccataataaacctctgaaccaaactttgggtctcattgtgattcttgtcagggacgtgggggtgggagaggataaaaggcggcgcaaaaagcagtaaccaggtccgtccagattctgcgggcataggataccataattttattggtgggtcgtttgttcggggacaagcgcgctcgtctgacgtttgggctactcgtcccagaatttggccaggacgtccttgtagaacgcgggtgggggggcctgggtccgcaactgctccagaaacctgtcggcgatatcaggggccgtgatataccgggtcacgatagatcgcgccaggttttcgtcacggatgtcctggtagataggcaggcgtttcagaagagtccacggcccccgctccttggggccgataagcgatatgacgtacttaatgtagcggtgttccaccagctcggtgatggtcatgggatcggggagccagtccagggactctggggcgtcgtggatgacgtggcgtcgccggttggccacataactgcggtgctcttccagcagctgcgcgttcgggacctggacgagctcgggcggggtgagtatctccgaggaggacgacctggggccggggtggcccccggtaacgtcccggggatccagggggaggtcctcgtcgtcttcgtatccgccggcgatctgttgggttagaatttcggtccacgagacgcgcgtctcggtgccgccggccgccggcggcagagggggcctggtttccgtggagcgcgagctggtgtgttcccggcggatggcccgccgggtctgagagcgactcgggggggtccagtgacattcgcgcagcacatcctccacggaggcgtaggtgttattgggatggaggtcggtgtggcagcggacaaagagggccaggaactgggggtagctcatcttaaagtacttcagtatatcgcgacagttgatcgtgggaatgtagcaggcgctaatatccaacacaatatcacagcccatcaacaggaggtcagtgtccgtggtgtacacgtacgcgaccgtgttggtgtgatagaggttggcgcaggcatcgtccgcctccaactgacccgagttgatgtaggcgtaccccagggcccggagaacgcgaatacagaacagatgcgccagacgcagggccggcttcgagggcgcggcggacggcagcgcggctccggacccggccgtcccccgggtccccgaggccagagaggtgccgcgtcggcgcatgttggaaaaggcagagctgggtctggagtcggtgatgggggaaggcggtggagaggcgtccacgtcactggcctcctcgtccgtccggcactgggccgtcgtgcgggccaggatggccttggctccaaacacaaccggctccatacaattgaccccgcgatcggtaacgaagatggggaaaagggacttttgggtaaacacctttaataagcgacagaggcagtgtagcgtaatggcctcgcggtcgtaactggggtatcggcgctgatatttgaccaccaacgtgtacatgacgttccacaggtccacggcaatgggggtgaagtacccggccggggccccaaggccccggcgcttgaccagatggtgtgtgtgggcaaacttcatcatcccgaacaaacccatgtcaggtcgattgtaactgcggatcggcctaactaaggcgtggttggtgcgacggtccgggacacccgagcctgtctctctgtgtatggtgacccagacaacaccaccgacacaagaggacaataatccgttaggggacgctctttataatttcgatggcccaactccacgcggattggtgcagcaccctgcatgcgccggtgcgggccaaccttccccccgctcattgcctcttccaaaagggtgtggcctaacgagctgggggcgtatttaatcaggctagcgcggcgggcctgccgtagtttctggctcggtgagcgacggtccggttgcttgggtcccctggctgccatcaaaaccccaccctcgcagcggcatacgccccctccgcgtcccgcacccgagaccccggcccggctgccctcaccaccgaagcccacctcgtcactgtggggtgttcccagcccgcgttgggatgacggattcccctggcggtgtggcccccgcctcccacgtggaggacgcgtcggacgcgtccctcgggcagccggaggagggggcgccctgccaggtggtcctgcagggcgccgagcttaatggaatcctacaggcgtttgccccgctgcgcacgagccttctggactcgcttctggttatgggagaccggggcatccttatccataacacgatctttggggagcaggtgttcctgcccctggaacactcgcaattcagtcggtatcgctggcgcggacccacggcggcgttcctgtctctcgtggaccagaagcgctccctcctgagcgtgtttcgcgccaaccagtacccggacctacgtcgggtggagttggcgatcacgggccaggccccgtttcgcacgctggttcagcgcatatggacgacgacgtccgacggcgaggccgttgagctagccagcgagacgctgatgaagcgcgaactgatgagctttgtggtgctggttccccagggaacccccgacgttcagttgcgcctgacgaggccgcagctcaccaaggtccttaacgcgaccggggccgatagtgccacgcccaccacgttcgagctcggggttaacggcaaattttccgtgttcaccacgagtacctgcgtcacatttgctgcccgcgaggagggcgtgtcgtccagcaccagcacccaggtccagatcctgtccaacgcgctcaccaaggcgggccaggcggccgccaacgccaagacggtgtacggggaaaatacccatcgcaccttctctgtagtcgtcgacgattgcagcatgcgggcggtgctccggcgactgcaggtcgccgggggcaccctcaagttcttcctcacgacccccgtccccagtctgtgcgtcaccgccaccggtcccaacgcggtatcggcggtatttctcctgaaaccccagaagatttgcctggactggctgggtcatagccaggggtctccttccgccgggagctcggcctcccgggcctctgggagcgagccaacagacagccaggactccgcgtcggacgcggtcagccacggcgatccggaagacctcgatggcgctgcccgggcgggagaggcgggggcctcgtacgcctgtccgatgccgtcgtcgaccacgcgggtcactcccacgaccaagcgggggcgctcggggggcgaggatgcgcacgcggacacggccctaaagaaacctaagacggggtcgcccaccgcacccccgcccgcagatccagtccccctggacacggaggacgactccgatgcggcggacgggacggcggcccgtcccgccgctccagacgcccgaagcggaagccgttacgcgtgttactttcgcgacctcccgaccggagaagcaagccccggcgccttctccgccttccgggggggcccccaaaccccgtatggttttggattcccctgacggggcggggccttagcggccgcccaaccctcgcaacatcccggggttaatgtaaataaacttggtattgcccaacactctcccgcgtgtcgcgtgtggttcatgtgtgtgcctggcgcccccaccctcgggttcgtgtatttcctttccctgtccttataaaagccgtatgtggggcgctgacggaaccaccccgcgtgccatcacggccaaggcgcgggatgctccgcaacgacagccaccgggccgcgtccccggaggacggccagggacgggtcgacgacggacggccacacctcgcgtgcgtgggggccctggcgcgggggttcatgcatatctggcttcaggccgccacgctgggttttgcgggatcggtcgttatgtcgcgcgggccgtacgcgaatgccgcgtctggggcgttcgccgtcgggtgcgccgtgctgggctttatgcgcgcgccccctcccctcgcgcggcccaccgcgcggatatacgcctggctcaaactggcggccggtggagcggcccttgttctgtggagtctcggggagcccggcacgcagccgggggccctggccccgggcccggccacccagtgcctggcgctgggcgccgcctatgcggcgctcctggtgctcgccgatgacgtctatccgctctttctcctcgccccggggcccctgttcgtcggcaccctggggatggtcgtcggcgggctgacgatcggaggcagcgcgcgctactggtggatcggtgggcccgccgcggccgccctggctgcggcggtgttggcgggcccgggggcgaccaccgccagggactgcttctccagggcgtgccccgaccaccgccgcgtctgcgtcatcgtcgcaggcgagtctgttacccgccgccccccagaggacccagagcgacccggggaccccgggccaccgtcccccccgacaccccaacgatcccaggggccgccggccgatgaggtcgcaccggccggggtagcgcggcccgaaaacgtctgggtgcccgtggtcacctttctgggggctggcgcgcttgccgtcaagacggtgcgagaacatgcccggggaacgccgggcccgggcctgccgctgtggccccaggtgtttctcggaggccatgtggcggtggccctgacggagctgtgtcaggcgcttgcgccctgggaccttacggaccagctgctgtttgttcacgccggactgcaggtcatccacctcgggttggtgtttcggttttccgaggttgtcgtgtatgcggcgctagggggtgccgtgtggatttcgttggcgcaggtgctggggctccggcgtcgcctgcacaggaaggaccccggggacggggcccggttggcggcgacgcttcggggcctcttcttctccgtgtacgcgctggggtttggggtgggggcgctgctgtgccctccggggtcaacgggctggcggtcgggcgattgatatatttttcaataaaaggcattagtcccgaagaccgccggtgtgtgatgatttcgccataacacccaaaccccggatggggcccgggtataaattccggaaggggacacgggctaccctcactatcgagggcgcttggtcgggaggccgcatcgaacgcacacccccatccggtggtccgtgtggaggtcgttttcagtgcccggtctcgctttgccgggaacgctagccgatccctcgcgagggggaggcgtcgggcatggccccggggcgggtgggccttgccgtggtcctgtggagcctgttgtggctcggggcgggggtgtccgggggctcggaaactgcctccaccgggcccacgatcaccgcgggagcggtgacgaacgcgagcgaggcccccacatcggggtcccccgggtcagccgccagcccggaggtcacccccacatcgaccccaaaccccaacaatgtcacacaaaacaaaaccacccccaccgagccggccagccccccaacaacccccaagcccacctccacgcccaaaagcccccccacgtccacccccgaccccaaacccaagaacaacaccacccccgccaagtcgggccgccccactaaaccccccgggcccgtgtggtgcgaccgccgcgacccattggcccggtacggctcgcgggtgcagatccgatgccggtttcggaattccacccgcatggagttccgcctccagatatggcgttactccatgggtccgtcccccccaatcgctccggctcccgacctagaggaggtcctgacgaacatcaccgccccacccgggggactcctggtgtacgacagcgcccccaacctaacggacccccacgtgctctgggcggagggggccggcccgggcgccgaccctccgttgtattctgtcaccgggccgctgccgacccagcggctgattatcggcgaggtgacgcccgcgacccagggaatgtattacttggcctggggccggatggacagcccgcacgagtacgggacgtgggtgcgcgtccgcatgttccgccccccgtctctgaccctccagccccacgcggtgatggagggtcagccgttcaaggcgacgtgcacggccgccgcctactacccgcgtaaccccgtggggtttgtctggttcgaggacgaccaccaggtgtttaacccgggccagatcgacacgcagacgcacgagcaccccgacgggttcaccaccgtctctaccgtgacctccgaggctgtcggcggccaggtccccccgcggaccttcacctgccagatgacgtggcaccgcgactccgtgacgttctcgcgacgcaatgccaccgggctggccctggtgctgccgcggccaaccatcaccatggaatttggggtccggcatgtggtctgcacggccggttgcgtccccgagggcgtgacgtttgcctggttcctgggggacgacccctcaccggcggctaagtcggccgttacggcccaggagtcgtgcgaccgccccgggctggctacggtccggtccaccctgcccatttcgtacgactacagcgagtacatctgtcggttgaccggatatccggccgggattcccgttctagagcaccacggcagtcaccagcccccacccagggaccccaccgagcggcaggtgatcgaggcgatcgagtgggtggggattggaatcggggttctcgcggcgggggtcctggtcgtaacggcaatcgtgtacgtcgtccgcacatcacagtcgcggcagcgtcatcggcggtaacgcgagacccccccgttacctttttaatatctatatagtttggtcccccctctatcccgcccaccgctgggcgctataaagccgccaccctctcttccctcaggtcatccttggtcgatcccgaacgacacacggcgtggagcaaaacgcctccccctgagccgctttcctaccaacacaccggcatgcctctgcgggcatcggaacacgcctaccggcccctgggccccgggacaccccccatgcgggctcggctccccgccgcggcctgggttggcgtcgggaccatcatcgggggagttgtgatcattgccgcgttggtcctcgtgccctcgcgggcctcgtgggcactttccccatgcgacagcggatggcacgagttcaacctcgggtgcatatcctgggatccgacccccatggagcacgagcaggcggtcggcggctgtagcgccccggcgaccctgatcccccgcgcggctgccaaacagctggccgccgtcgcacgcgtccagtcggcaagatcctcgggctactggtgggtgagcggagacggcattcgggcctgcctgcggctcgtcgacggcgtcggcggtattgaccagttttgcgaggagcccgcccttcgcatatgctactatccccgcagtcccgggggctttgttcagtttgtaacttcgacccgcaacgcgctggggctgccgtgaggcgcgtgtactgcggtctgtctcgtctcctcttctccccttccctccccctccgcatcccaggatcacaccggtcaacgagggttggggggggtccggcacggacccaaaataataaacacacaatcacgtgcgataaaaagaacacgcggtcccctgtggtgtttttggttatttttattaaatctcgtcgacaaacaggggaaaggggcgtggtctagcgacggcagcacgggcggaggcgttcaccggctccggcgtccttcgcgtttaagcttggtcaggagggcgctcagggcggcgacgttggtcgggccgtcgttggtcagggcgttggctcgatggcgggcgaggacgggcgaggggctcaacggcgggggcgggggcccggtgcggcccgggggggaaaatagggcggatccccccccagtcgtacaggggattttccgcctcaatgtacggggaggccggcgctgcattcgccgtgttcacgcagacgttttcgtagacccgcatccatggtatttcctcgtagacacgccccccgtcctcgctcaccgtctcgtatattgactcgtcgtcctcgtagggggcgtgccgttcgcgggccgaggcggcgtgggtggctttgtggcgggcgtcgtcgtcgtcgtcggccgtcagatacgtggcttccatctggtcgggttctccctccggggcgggtccccacacccgtggccgatcgaggctccccagagacgcgcgccggacgaggagggggcacgtcgccaccggcggtcgcctgtcgggtcccgcgccgttacgggccgggaggcgcgggggcacctcccccatgtgcgtgtaatacgtggccggctgtgcggccgcagcggggggctcggtgaccgggtcgtccgcatccggaagcgggggccccgcgccgtccgcgcggcgcctccggaaccgccgggtggacgcgggggtcgagtgtaggcgaggtcgggggaggggcgggggctcgttgtcgcgccgcgcccgctgaatcttttcccgacaggtcccaccccccgcgcgatgcccccccgggccgcgggccatatcgtccgggggaggccccgcggaccacgtcgtccggcgagacgccacgagccgcaggatggactcgtagtggagcgacggcgccccgctgcggagcagatccgcggccagggcggccccgaaccaagccttgatgctcaactccatccgggcccagctgggggcggtcatcgtggggaacaggggggcggtggtccgacagaaacgctcctggctgtccaccgcggcccgcagatactcgttgttcaggctgtcggtggcccagacgccgtacccggtgagggtcgcgttgatgatatactgggcgtggtgatggacgatcgacagaacctccaccgtggatacgacggtatccacggtcccgtacgtaccgccgctccgcttgccggtctgccacaggttggctaggcgcgtcaggtggcccaggacgtcgctgaccgccgccctgagcgccatgcactgcatggagccggtcgtgccgctgggaccccggtccagatggcgcgcgaacgtttccgcgggcgcctccgggctgccgccgagcgggaggaactgacgattggagggactcagccggtgacatacgtgcttgtccgtcgtccacagcatccaggacgcccaccggtacaacacggagacgtaggccaggagctcgttgagccgcagtgcggtgtcggtgctagggcggcttgggtccgccgggcgcataaagaacatgtactgctgaatccgatggagggcgtcgcgcaggccggccacggtggcggcgtacttggccgccacggccccgctcttgaacggggtgcgcgccagcagctttggcgccagggtgggccgcagcagcacgtgaaggctggggtcgcagtcgcccacggggtcctcggggacgtccaggccgctgggcaccaccgtctgcaggtacttccagtactgcgtgaggatggcgcggctcaactggccgccgggcagctccacctcgcccagcgcctgggtggcggccgaagcgtagtgccggatgtactcgtagtgcgggtcgctggcgagcccgtccacgatcaaactctcgggaaccgtgttgtgttgccgcgcggccaaccggacgctgcgatcggtgcaggtcagaaacgccggctgcgcgtcgtcggagcgctgccgcaaggcgcccacggccgcgctaaggagcccctccggggtggggagcagacacccgccgaagatgcgccgctcgggaacgcccgcgttgtcgccgcggatcaggttggcaggcgtcaggcaccgcgccagccgcagggagctcgcgccgcgcgtccggcgctgcatggtgacgcccgttcggtcgggacccgccggtcggagttatgccgcgtccagggccatcggggcgctttttatcgggaggagcttatgggcgtggcgggcctcccagcccggtcgcgcgcctccccgacacgtgcgcccgcagggcggcggccccctcgtctcccatcagcagtttcctaaactgggacatgatgtccaccacgcggacccgcgggcccaacacggacccgccgcttacgggggcgggggggaagggctccaggtccttgagaagaaaggcggggtctgccgtcccggacacgggggcccggggcgctgaggaggcggggcgcagatccacgtgctccgcggccgcgcggacgtccgcccagaacttggcgggggtggtgcgcgcgtacaggggctgggtcgctcggaggacgcacgcgtagcgcaggggggtgtacgtgcccacctcgggggccgtgaatcccccgtcaaacgcggccagtgtcacgcacgccaccacggtgtcggcaaagcccagcagccgctgcaggacgagcccggcggccagaatggcgcgcgtggccgccgcgtcgtcccggcgccggtgcgcgtccccgcacgcccgggcgtactttaaggtcacggtcgccagggccgtgtgcagcgcgtacaccgcagcgcccagcacggcgttgagcccgctgttggcgagcagccggcgcgctgcggtgtcgcccagcgcctcgtgctcggcccccacgaccgcggggcttcccaggggcagggcgcgaaacagctcctcccgcgccacgtccgcaaaggcggggtggtgcacgtgcgggtgcaggcgcgcccccacgaccaccgagagccactggaccgtctgctccgccatcaccgccagcacatccagcacgcgccccaggaaggcggcctcccgcgtcaaaacgcaccggacggcgtcgggattgaagcgggcgagcagggccccggtggccaggtacgtcatgcggccggcatagcgggcggccacgcgacagtcgcggtccagcagcgcgcgcaccccgggccagtacagcagggaccccagcgagctgcggaacaccgcggcgtcggggccggattggggggacactaacccccccgcgctcagtaacggcacggccgcggccccgacgggacgcaacgccgtgaggctcgcgaactgccgcctcagctcggccgccctgtcgtccaggtcagacccgcgcgcctccgcgtgaaggcgcgtcccgcacacccacccgttgatggccagccgcacgacggcatccgccaaaaagctcatcgcctgggcggggctggtttttgttcgacgatccgtcaggtcaagaatcccatcgcccgtgatataccaggccaacgcctcgccctgctgcagggtttggcggaaaaacaccgcggggttgtcgggggaggcgaagtgcatgacccccacgcgcgataacccgaacgcgctatccggacacgggtaaaacccggccggatgccccagggctagggcggagcgcacggactcgtcccacacggcaacctgaggggccagtcgatccaacgggaatgccgcccggagctccgggcccggcacgcgtccctccagaacctccaccttgggcggggaacgggccccgccgccgtcctccggcccgacggcttccgggtagtcgtcctcctcgtactgcagctcctctaggaacagcggcgacggcgccacccgcgaaccgccgacccgccccaaaatagcccgcgcgtcgacgggacccaggtatcccccctgccgggcctgcggaggaccgcggggaacctcatcatcatcgtccaggcgaccgcgcaccgactggctacgggccgcatcgggcccggggcgctgccgggacgctcggcgatgggatgtgggcggggcttccgacgcgcgccgtcgtcgggctcgcgggccttcccgtcgacggcgcacgggcggctcgtcgcccgccatctcctccagagcctctagctcgctgtcgtcatccccgcggaacaccgcacgcaggtaccccatgaaccccaccccatcgcccgctggctcgtccgccacgggcgaggcgcgggggcgggtggatgcgcgcctcctgcgccccgcgggttcgcgagccgacatggtggcgatagacgcgggttatcggatgtccgctaccccccaaaaaagaaaaagaccccacagcgcggatggaggccggggtaggtgccgccggaccccctcgcgatgggaatggacgggagcgacggggccggcgcaaaaaaacgcagtatctcccgcgaaggctacccgccgccccagcccccggccaaatgcggaaacggtcccgcgctctcgcctttatacgcgggccgccctgcgacacaatcacccgtccgtggtttcgaatctacacgacaggcccgcagacgcggctaacacacacgccggcaacccagaccccagtgggttggttgcgcggtcccgtctcctggctagttctttcccccaccaccaaataatcagacgacaaccgcaggttttgtaatgtatgtgctcgtgtttattgtggatacgaaccggtgacgggaggggaaaacccagacgggggatgcgggtccggtcgcgccccctacccaccgtactcgtcaattccaagggcatcggtaaacatctgctcaaactcgaagccggccatatccagagcgccgtagggggcggagtcgtggggggtaaatcccggccccggggaatccccgtcccccaacatgtccagatcgaaatcgtctagcgcgtcggcatgcgccatcgccacgtcctcgccgtctaagtggagctcgtcccccaggctgacatcggtcgggggggccgtcgacagtctgcgcgtgtgtcccgcggggagaaaggacaggcgcggagccgccagccccgcctcttcgggggcgtcgtcgtccgggagatcgagcaggccctcgatggtagacccgtaattgtttttcgtacgcgcgcggctgtacgcgtgttcccgcatgaccgcctcggagggcgaggtcgtgaagctggaatacgagtccaacttcgcccgaatcaacaccataaagtacccagaggcgcgggcctggttgccatgcagggtgggaggggtcgtcaacggcgcccctggctcctccgtagccgcgctgcgcaccagcgggaggttaaggtgctcgcgaatgtggtttagctcccgcagccggcgggcctcgattggcactccccggacggtgagcgctccgttgacgaacatgaagggctggaacagacccgccaactgacgccagctctccaggtcgcaacagaggcagtcaaacaggtcgggccgcatcatctgctcggcgtacgcggcccataggatctcgcgggtcaaaaatagatacaaatgcaaaaacagaacacgcgccagacgagcggtctctcggtagtacctgtccgcgatcgtggcgcgcagcatttctcccaggtcgcgatcgcgtccgcgcatgtgcgcctggcggtgcagctgccggacgctggcgcgcaggtaccggtacagggccgagcagaagttggccaacacggttcgatagctctcctcccgcgcccgtagctcggcgtggaagaaacgagagagcgcttcgtagtagagcccgaggccgtcgcgggtggccggaagcgtcgggaaggccacgtcgccgtgggcgcgaatgtcgatttgggcgcgttcggggacgtacgcgtccccccattccaccacatcgctgggcagcgttgataggaatttacactcccggtacaggtcggcgttggtcggtaacgccgaaaacagatcctcgttccaggtatcgagcatggtacatagcgcggggcccgcgctaaagcccaagtcgtcgaggagacggttaaagagggcggcgggggggacgggcatgggcggggagggcatgagctgggcctggctcaggcgccccgttgcgtacagcggaggggccgccggggtgtttttgggacccccggccgggcgggggggcggtggcgaagcgccgtccgcgtccatgtcggcaaacagctcgtcgaccaagaggtccattgggtggggttgatacgggaaagacgatatcgggcttttgatgcgatcgtccccgcccgcccagagagtgtgtgacgcccgacggcgcgggaagagaaaaacccccaaacgcgttagaggaccggacggaccttatggggggaagtgggcagcgggaaccccgtccgttccctaggaatgacagcccgtggtcgccaccccgcatttaagcaacccgcacgggccgccccgtacctcgtgacttccccccacattggctcctgtcacgtgaaggcgaaccgagggcggctgtccaacccaccaccccgccacccagtcacggtccccgtcggattgggaaacaaaggcacgcaacgccaacaccgaatgaacccctgttggtgctttattgtctgggtacggaagtttttcactcgacgggacgtctggggcgagaagcggagcgggctggggctcgaggtcgctcggtggggcgcgacgccgcagaacgccctcgagtcgccgtggccgcgtcgacgtcctgcaccacgtctggattcaccaactcgttggcgcgctgaagcaggtttttgccctcgcagaccgtcacgcggatggtggtgatgccaaggagttcgttgaggtcttcgtctgtgcgcggacgcgacatgtcccagagctggaccgccgccatccgggcatgcatggccgccaggcgcccgaccgcggcgcagaagacgcgcttgttaaagccggccacccggggggtccatggcgcgtcggggtttgggggggcggtgctaaagtgcagctttctggccagcccctgcgcgggtgtcttggatcgggttggcgccgtcgacgcgggggcgtctgggagtgcggcggattctggctgggccgatttcctgccgcgggtggtctccgccgccggggccgcgggggccttagtcgccacccgctgggttcggggggcccggggggcggtggtgggtgtgcgtccggcccctccggacccagcgggtggcggaggcgcccgcgcaggccccgggccggacaaaaccgccccggaaacgggacgccgcgtccggggggcctccgggtgttcgtcgtcttcggatgacgagcccccgtagagggcataatccgactcgtcgtactggacgaaacggacctcgcccctctggcgcgagcgtgtctgtagggcgccacggcgggaggtgtcaggcggactatcgggactcgccatacctgaagacggggtgtagtacagatcctcgtactcatcgcgcggaacctcccgcggacccgacttcacggagcggcgagaggtcatggttccacgaacacgctagggtcggatgcgcggacaattaggcctgggttcggacggcgggggtggtgcaggtgtggagaggtcgagcgataggggcggcccgggagagaagagagggtccgcaaaacccactggggatgcgtgagtggccctctgtgggcggtgggggagagtcttataggaagtgcatataaccacaacccatgggtctaaccaatccccaggggccaagaaacagacacgccccaaacggtctcggtttccgcgaggaaggggaagtcctgggacaccctccacccccacccctcaccccacacagggcggattcaggcgtgcccggcagccagtagcctctggcagatctgacagacgtgtgcgataatacacacgcccatcgaggccatgcctacataaaagggcaccagggcccccggggcagacatttggccagcgttttgggtctcgcaccgcgcgcccccgatcccatcgcgcccgccctcctcgccgggcggctccccgtgcgggcccgcgtctcccgccgctaaggcgacgagcaagacaaacaacaggcccgcccgacagacccttctgggggggcccatcgtccctaacaggaagatgagtcagtggggatccggggcgatccttgtccagccggacagcttgggtcgggggtacgatggcgactggcacacggccgtcgctactcgcgggggcggagtcgtgcaactgaacctggtcaacaggcgcgcggtggcttttatgccgaaggttagcggggactccggatgggccgtcggccgcgtctctctggacctgcgaatggctatgccggctgacttttgcgcgattattcacgcccccgcgctagccagccccgggcaccacgtaatactgggtcttatcgactcggggtaccgcggaaccgttatggccgtggtcgtagcgcctaaaaggacgcgggaatttgcccccgggaccctgcgggtcgacgtgacgttcctggacatcctggcgacccccccggccctcaccgagccgatttccctgcggcagttcccgcaactggcgcccccccctccaaccggggccgggatacgcgcagatccttggctggagggggcgctcggggccccaagcgtgactacggccctaccggcgcgacgccgagggcggtccctcgtctatgccggcgagctgacgccggttcagacggaacacggggacggcgtacgagaagccatcgccttccttccaaaacgcgaggaggatgccggtttcgacattgtcgtccgtcgcccggtcaccgtcccggcaaacggcaccacggtcgtgcagccatccctccgcatgctccccgcggacgccgggcccgcggcctgctatgtgttggggcggtcgtcgctcaacgcccgcggcctcctggtcgttcctacgcgctggctccccgggcacgtatgtgcgtttgttgtttacaaccttacgggggttcctgtgaccctcgaggccggcgccaaggtcgcccggctcctggttgcgggggcggacgctcttccttggatccccccggacaactttcacgggaccaaagcgcttcgaaactaccccaggggtgttccggactcaaccgccgaacccaggaacccgccgctcctggtgtttacgaacgagtttgacgcggaggcccccccgagcgagcgcgggaccgggggttttggctctaccggtatttagcccacagctttgggttcggtccgggcaataaaaaacgtttgtatcgcatctttcctgtgtgtagttgtttatgttggatgcctgtgggtctatcacacccgcccctccatcccacaaacacaaaacacacgggttgaataaaaacacgcatttattgacccaaaacacacggagctgctcgagatgggccagggcgaggtgcggttggggaggctgtaggtctgggaacggacacgcggggacacgattccggtttggggtccgggagggcgtcgccgttttgggcggcaggcgccagcgtaacctccgggggcggcgtgtgggggtgccccaaggagggcgcctcggtcaccccaatcccccccgaccgggttcccccggcaaccccgaaggcggagaggccaagggcccgttcggcgatggccacatcctccatgaccacgtcactctcggccatgctccgaatagcctgggagacgagcacatccgcggacttgtcagccgcccccacggacatgtacatctgcaggatggtggccatacacgtgtccgccaggcgccgcatcttgtcctgatgggccgccacggccccgtcgatcgtgggggcctcgagcccggggtggtggcgcgccagtcgttctaggttcaccatgcaggcgtggtacgtgcgggccaaggcgcgggccttcacgaggcgtcgggtgtcgtccagggaccccagggcgtcatcgagcgtgatgggggcgggaagtagcgcgttaacgaccgccagggcctcctgcagccgcggctccgcctccgagggcggaacggccgcgcggatcatctcatattgttcctcggggcgcgctccccagccacatatagccccgagaagagaagccatcgcgggcgggtactggcccttgggcgcgcggacgcaatggggcaggaagacgggaaccgcggggagaggcgggcggccgggactcccgtggaggtgaccgcgctttatgcgaccgacgggtgcgttattacctcttcgatcgccctcctcacaaactctctactgggggccgagccggtttatatattcagctacgacgcatacacgcacgatggccgtgccgacgggcccacggagcaagacaggttcgaagagagtcgggcgctctaccaagcgtcgggcgggctaaatggcgactccttccgagtaaccttttgtttattggggacggaagtgggtgggacccaccaggcccgcgggcgaacccgacccatgttcgtctgtcgcttcgagcgagcggacgacgtcgccgcgctacaggacgccctggcgcacgggaccccgctacaaccggaccacatcgccgccaccctggacgcggaggccacgttcgcgctgcatgcgaacatgatcctggctctcaccgtggccatcaacaacgccagcccccgcaccggacgcgacgccgccgcggcgcagtatgatcagggcgcgtccctacgctcgctcgtggggcgcacgtccctgggacaacgcggccttaccacgctatacgtccaccacgaggtgcgcgtgcttgccgcgtaccgcagggcgtattatggaagcgcgcagagtcccttctggtttcttagcaaattcgggccggacgaaaaaagcctggtgctcaccactcggtactacctgcttcaggcccagcgtctggggggcgcgggggccacgtacgacctgcaggccatcaaggacatctgcgccacctacgcgattccccacgccccccgccccgacaccgtcagcgctgcgtccctgacctcgtttgccgccatcacgcggttctgttgcacgagccagtacgcccgcggggccgcggcggccgggtttccgctttacgtggagcgccgtattgcggccgacgtccgcgagaccagtgcgctggagaagttcataacccacgatcgcagttgcctgcgcgtgtccgaccgtgaattcattacgtacatctacctggcccattttgagtgtttcagccccccgcgcctagccacgcatcttcgggccgtgacgacccacgaccccaaccccgcggccagcacggagcagccctctcccctgggcagggaggccgtggaacaatttttttgtcacgtgcgcgcccaactgaatatcggggagtacgtcaaacacaacgtgaccccccgggagaccgtcctggatggcgatacggccaaggcctacctgcgcgctcgcacgtacgcgcccggggccctgacgcccgcccccgcgtattgcggggccgtggactccgccaccaaaatgatggggcgtttggcggacgccgaaaagctcctggtcccccgcgggtggcccgcgtttgcgcccgccagtcccggggaggacacggcgggcggcacgccgcccccacagacctgcggaattgtcaagcgcctcctgagactggccgccacggaacagcagggcaccacacccccggcgatcgcggcgcttatccgtaatgcggcggtgcagactcccctgcccgtctaccggatatccatggtccccacgggacaggcatttgccgcgctggcctgggacgactgggcccgcataacgcgggacgctcgcctggccgaagcggtcgtgtccgccgaagcggcggcgcaccccgaccacggcgcgctgggcaggcggctcacggatcgcatccgcgcccagggccccgtgatgccccctggcggcctggatgccggggggcagatgtacgtgaatcgcaacgagatattcaacggcgcgctggcaatcacaaacatcatcctggatctcgacatcgccctgaaggagcccgtcccctttcgccggctccacgaggccctgggccactttaggcgcggggctctggctgcggttcagctcctgtttcccgcggcccgcgtggaccccgacgcatatccctgttattttttcaaaagcgcatgtcggcccggcccggcgtccgtgggttccggcagcggactcggcaacgacgacgacggggactggtttccctgctacgacgacgccggtgatgaggagtgggcggaggacccgggcgccatggacacatcccacgatcccccggacgacgaggttgcctactttgacctgtgccacgaagtcggccccacggcggaacctcgcgaaacggattcgcccgtgtgttcctgcaccgacaagatcggactgcgggtgtgcatgcccgtccccgccccgtacgtcgtccacggttctctaacgatgcggggggtggcacgggtcatccagcaggcggtgctgttggaccgagattttgtggaggccatcgggagctacgtaaaaaacttcctgttgatcgatacgggggtgtacgcccacggccacagcctgcgcttgccgtattttgccaaaatcgcccccgacgggcctgcgtgcggaaggctgctgccagtgtttgtgatcccccccgcctgcaaagacgttccggcgtttgtcgccgcgcacgccgacccgcggcgcttccattttcacgccccgcccacctatctcgcttccccccgggagatccgtgtcctgcacagcctgggtggggactatgtgagcttctttgaaaggaaggcgtcccgcaacgcgctggaacactttgggcgacgcgagaccctgacggaggtcctgggtcggtacaacgtacagccggatgcgggggggaccgtcgaggggttcgcatcggaactgctggggcggatagtcgcgtgcatcgaaacccactttcccgaacacgccggcgaatatcaggccgtatccgtccggcgggccgtcagtaaggacgactgggtcctcctacagctagtccccgttcgcggtaccctgcaacaaagcctgtcgtgtctgcgctttaagcacggccgggcgagtcgcgccacggcgcggacattcgtcgcgctgagcgtcggggccaacaaccgcctgtgcgtgtccttgtgtcagcagtgctttgccgccaaatgcgacagcaaccgcctgcacacgctgtttaccattgacgccggcacgccatgctcgccgtccgttccctgcagcacctctcaaccgtcgtcttgataacggcgtacggcctcgtgctcgtgtggtacaccgtcttcggtgccagtccgctgcaccgatgtatttacgcggtacgccccaccggcaccaacaacgacaccgccctcgtgtggatgaaaatgaaccagaccctattgtttctgggggccccgacgcacccccccaacgggggctggcgcaaccacgcccatatctgctacgccaatcttatcgcgggtagggtcgtgcccttccaggtcccacccgacgccatgaatcgtcggatcatgaacgtccacgaggcagttaactgtctggagaccctatggtacacacgggtgcgtctggtggtcgtagggtggttcctgtatctggcgttcgtcgccctccaccaacgccgatgtatgtttggcgtcgtgagtcccgcccacaagatggtggccccggccacctacctcttgaactacgcaggccgcatcgtatcgagcgtgttcctgcagtacccctacacgaaaattacccgcctgctctgcgagctgtcggtccagcggcaaaacctggttcagttgtttgagacggacccggtcaccttcttgtaccaccgccccgccatcggggtcatcgtaggctgcgagttgatgctacgctttgtggccgtgggtctcatcgtcggcaccgctttcatatcccgtggggcatgtgcgatcacataccccctgtttctgaccatcaccacctggtgttttgtctccaccatcggcctgacagagctgtattgtattctgcggcggggcccggcccccaagaacgcagacaaggccgccgccccggggcgatccaaggggctgtcgggcgtctgcgggcgctgttgttccatcatcctctcgggcatcgcagtgcgattgtgttatatcgccgtggtggccggggtggtgctcgtggcgcttcactacgagcaggagatccagaggcgcctgtttgatgtatgacgtcacatccaggccggcgtaacccggaacggcatatgcaaattggaaactgtcctgtcttggggcccacccacccgacgcgtcatatgcaaatgaaaatcggtcccccgaggccacgtgtagcctggatcccaacgaccccgcccatgggtcccaattggccgtcccgttaccaagaccaacccagccagcgtatccacccccgcccgggtccccgcggaagcggaacggtgtatgtgatatgctaattaaatacatgccacgtacttatggtgtctgattggtccttgtctgtgctggaggtggggcgggggccccgcccggggggcggaacgaggaggggtttgggagagccggccccggcaccacgggtataaggacatccaccacccggccggtggtggtgtgcagccgtgttccaaccacggtcacgcttcggtgcctctccccgattcgggcccggtcgctcgctaccggtgcgccaccaccagaggccatatccgacaccccagccccgacggcagccgacagcccggtcatggcaactgacattgatatgctaattgacctcggcctggacctctccgacagcgatctggacgaggacccccccgagccggcggagagccgccgcgacgacctggaatcggacagcagcggggagtgttcctcgtcggacgaggacatggaagacccccacggagaggacggaccggagccgatactcgacgccgctcgcccggcggtccgcccgtctcgtccagaagaccccggcgtacccagcacccagacgcctcgtccgacggagcggcagggccccaacgatcctcaaccagcgccccacagtgtgtggtcgcgcctcggggcccggcgaccgtcttgctcccccgagcagcacgggggcaaggtggcccgcctccaacccccaccgaccaaagcccagcctgcccgcggcggacgccgtgggcgtcgcaggggtcggggtcgcggtggtcccggggccgccgatggtttgtcggacccccgccggcgtgcccccagaaccaatcgcaacccggggggaccccgccccggggcggggtggacggacggccccggcgccccccatggcgaggcgtggcgcggaagtgagcagcccgacccacccggaggcccgcggacacggggcgtgcgccaagcaccccccccgctaatgacgctggcgattgcccccccgcccgcggacccccgcgccccggccctggagcgaaaggcgcccgccgccgacaccatcgacgccaccacgcggttggtcctgcgctccatctccgagcgcgcggcggtcgaccgcatcagcgagagctttggccgcagcgcacaggtcatgcacgacccctttggggggcagccgtttcccgccgcgaatagcccctgggccccggtgttggcgggccaaggagggccctttgacgccgagaccagacgggtctcctgggaaaccttggtcgcccacggcccgagcctctatcgcacttttgccggcaatcctcgggccgcatcgaccgccaaggccatgcgcgactgcgtgctgcgccaagaaaatttcatcgaggcgctggcctccgccgacgagacgctggcgtggtgcaagatgtgcatccaccacaacctgccgctgcgcccccaggaccccattatcgggacggccgcggctgtgctggataacctcgccacgcgcctgcggccctttctccagtgctacctgaaggcgcgaggcctgtgcggcctggacgaactgtgttcgcggcggcgtctggcggacattaaggacattgcatccttcgtgtttgtcattctggccaggctcgccaaccgcgtcgagcgtggcgtcgcggagatcgactacgcgacccttggtgtcggggtcggagagaagatgcatttctacctccccggggcctgcatggcgggcctgatcgaaatcctagacacgcaccgccaggagtgttcgagtcgtgtctgcgagttgacggccagtcatatcgtcgcccccccgtacgtgcacggcaaatatttttattgcaactccctgttttaggtacaataaaaacaaaacatttcaaacaaatcgccccacgtgttgtccttctttgctcatggccggcggggcgtgggtcacggcagatggcgggggtgggcccggcgtacggcctgggtgggcggagggaactaacccaacgtataaatccgtccccgctccaaggccggtgtcatagtgcccttaggagcttcccgcccgggcgcatccccccttttgcactatgacagcgacccccctcaccaacctgttcttacgggccccggacataacccacgtggcccccccttactgcctcaacgccacctggcaggccgaaacggccatgcacaccagcaaaacggactccgcttgcgtggccgtgcggagttacctggtccgcgcctcctgtgagaccagcggcacaatccactgctttttctttgcggtatacaaggacacccaccacacccctccgctgattaccgagctccgcaactttgcggacctggttaaccacccgccggtcctacgcgaactggaggataagcgcggggggcggctgcggtgtgcacggccgtttagcgtcgggacgattaaggatgtctctgggtccggcgcgtcctcggcgggagagtacacgataaacgggatcgtgtaccactgccactgtcggtatccgttctcaaaaacatgctggatgggggcctccgcggccctacagcacctgcgctccatcagctccagcggcatggccgcccgcgcggcagagcatcgacgcgtcaagattaaaattaaggcgtgatttccaacccccatgaatgtgtgtaaccccccccaaaaaaataaagagccgtaacccaaccaaaccaggcgtggtgtgagtttgtggacccaaagccctcagagacaacgcgacaggccagtatggaccgtgagacttttatttattaactcacaggggcgcttaccgccacaggaataccagaataatgaccaccacaatcgcgaccaccccaaatacagcatggcgccccaccacgccacaacagccctgtcgccggtatggggcatgatcagacgagccgcgagccgcgcgttgggccctgtacagctcgcgcgaattgaccctaggaggccgccacgcgcccgagttttgcgttcgtcgctggtcgtcgggcaccaaagccccggacggctgttcggtcgaacgaacggccacgacaatggcataggttggggggtggtccgacatagcctcggcgtacgtcgggaggcccgacaagaggtcccttgtgatgtcgggtggggccacaagcctggtttccggaagaaacaggggggttgccaataacccgccagggccaaaactccggcgctgcgcacgtcgttcggcgcggcgccgggcgcgccgagcggctcgctgggcggcttggcgtgagcggccccgctccgacgcctcgccctctccggaggaggttggcggaattggcacggacgacaggggcccagcagagtacggtggaggtgggtccgtgggggtgtccagatcaataacgacaaacggcccctcgttcctaccagacaagctatcgtaggggggcgggggatcagcaaacgcgttccccgcgctccatagacccgcgtcgggttgcgccgcctccgaagccatggatgcgccccaaagccacgactcccgcgcgctaggtccttggggtaagggaaaaggccctactccccatccaagccagccaagttaacgggctacgccttcggggatgggactggcaccccggcggattttgttgggctggtacgcgtcgcccaaccgagggccgcgtccacgggacgcgccttttataaccccgggggtcattcccaacgatcacatgcaatctaactggctcccctctccccccctctcccctctccccccctctcccctctccccccctctcccctctccccccctctcccctctccccccctctcccctctccccccctctcccctctccccccctctcccctctccccctctccccccctctcccctctcccctctcccctctcccctctcccctctcccctctccccccctctcccctctcccctctcccctctcccctctcccctctcccctctcccctctcccctctcccctctcccctctccccccctctcccctctcccccctctcccctctccccccctctccccccctctcccctctcccctgctctttccccgtgacacccgacgctggggggtgtggctgccgggaggggccgcggatgggcgggcctactcggtctcccgcccccgccccgccccaccggctttgctccccgtcgatcccctgctacccccaacccgtgctcgtggtgcgggttgggtgggggggagtgtgggtgggggtgcgcgggaggtgtcggtggtggtggtggtggtggtggtagtaggaatggtggtgagggggggggcgctggttggtcaaaaaagggagggacgggggccggcagaccgacggcgacaacgctcccaggcggccgggtcgcggctcttacgagcggcccggcccgcgctccccccccccccccccccgggccgtgtccttgctttccccccgtctccccccccctcctcctcctcctcgtttttccaaaccccgcccacccggcccggcccggcccggccaccgccgcccacccacccaccgcgggagacccagccccggtcccccgttccccgggggccgttatctccagcgccccgtccggcgcgccgccccccgccgctaaaccccatcccgcccccgggaccccacatataagcccccagccacacgcaagaacagacacgcagaacggctgtgtttatttaaacaaaccgatgtcggaataaacaaacacaaacacccgcgacggggggacggagggaggggggtgacgggggacggaaacagacacaaaaaacaaccacaaaaaaaacagccacccccgacaccccccaccccagtctcctcgccttttcccacccaccccacgcccccactgagcccggtcgatcgacgagcacccccgcccacgcccccgcccctgccccggcgacccccggcccgcacgatcccgacaacaataacaaccccaacggaaagcggcggggtgttgggggaggcgaggaacaaccgaggggaacgggggatggaaggacgggaagtggaagtcctgatacccatcctacacccccctgccttccaccctccggccccccgcgagtccacccgccggccggctaccgagaccgaacacggcggccgccgcagccgccgcagccgccgccgacaccgcagagccggcgcgcgcacacacaagcggcagaggcagaaaggcccagagtcattgtttatgtggccgcgggccagcagacggcccgcgacacccccccccgcccgtgtgggtatccggccccccgccccgcgccggtccattaagggcgcgcgtgcccgcgagatatcaatccgttaagtgctctgcagacaggggcaccgcgcccggaaatccattaggccgcagacgaggaaaataaaattacatcacctacccacgtggtgctgtggcctgtttttgctgcgtcatctgagcctttataaaagcgggggcgcggccgtgccgatcgcgggtggtgcgaaagactttccgggcgcgtccgggtgccgcggctctccgggcccccctgcagccggggcggccaaggggcgtcggcgacatcctccccctaagcgccggccggccgctggtctgttttttgttttccccgtttcgggggtggggggttacggtttctgttttttaaacccgtctggggtgtttttcgttccgtcgccgggatgtttcgttcgttcggcccctcacggggcgaaggccgcgtacggcccgggacgaggggcccccgaccgcggcggtccgggccccgtccgggcccgctcgccggcacgcgacgcgaaaaaggccccccggaggcttttccgggttcccggcccggggcctgagatgaacactcggggttaccgccaacggccggcccccgtggcggcccggcccggggccccggcggacccaaggggccccggcccggggccccacaacggcccggcgcatgcgctgtggttttttttttctcggtttgttttgtcgggctccgtcgcctttcctgttctcgcttctccccccccccttcttcacccccagtaccctcctccctcccttcctcccccgttatcccactcgtcaagggcgccccggtgtggttcaacaaagacgccgcggttccaggtaggttagacacctgcttctccccaatagaggggggggacccaaacgacagggggcgccccagaggctaaggtcggccacgccactcgcgggtgggctcgtgttacagcacaccagcccgttcttttccccccccctcccacccttagtcagactctgttacttacccgtccgaccaccaactgcccccttatctaagggccggctggaagaccgccagggggtcggccggtgtcgctgtaaccccccacgccaatgacccacgtactccaagaaggcatgtgtcccaccccgcctgtgtttttgtgcctggctctctatgcttgggtcttactgcctgggggggggtgcgggggagggggggtgtggaaggaaatgcacggcgcgtgtgtacccccccctaaagttgttcctaaagcgaggatatggaggagtggcgggtgccgggggacgggggtgatctctggcacgcgggggtgggaagggtcgggggagggggggatggggtaccggcccacctggccgacgcgggtgcgcgtgcctctgcacaccaaccccacgtcccccggcggtctctaagaagcaccgccccccctccttcataccaccgagcatgcctgggtgtgggttggtaaccaacacgcccatcccctcgtctcctgtgattctctggctgcaccgcattcttgttttctaactatgttcctgtttctgtctccccccccccccaccccctccgccccaccccccaacacccacgtctgtggtgtggccgacccccttttgggcgccccgtcccgccccgccacccctcccgtcctttgttgccctatagtgtagttaaccccccccgccctttgtggcggccagaggccaggtcagtccgggcgggcaggcgctcgcggaaacttaacacccacacccaacccactgtggttctggctccatgccagtggcaggatgctttcggggatcggtggtcaggcagcccgggccgcggctctgtggttaacaccagagcctgcccaacatggcacccccactcccacgcacccccactcccacgcacccccactcccacgcacccccactcccacgcacccccactcccacgcacccccactcccacgcacccccactcccacgcacccccactcccacgcacccccactcccacgcacccccgcgatacatccaacacagacagggaaaagatacaaaagtaaacctttatttcccaacagacagcaaaaatcccctgagtttttttttattagggccaacacaaaagacccgctggtgtgtggtgcccgtgtctttcactttccacctccccgacacggattggctggtgtagtgggcgcggccagagaccacccagcgcccgaccccccctccccacaaacacggggggcgtcccttattgttttccctcgtcccgggtcgacgccccctgctccccggaccacgggtgccgagaccgcaggctgcggaagtccagggcgcccactagggtgccctggtcgaacagcatgttccccacgggggtcatccagaggctgttccactccgacgcgggggccgtcgggtactcggggggcgtcacgtggttacccgcggtctcggggagcagggtgcggcggctccagccggggaccgcggcccgcagccgggtcgccatgtttcccgtctggtccaccaggaccacgtacgccccgatgttccccgtctccatgtccaggatgggcaggcagtcccccgtgatcgtcttgttcacgtaaggcgacagggcgaccacgctagagacccccgagatgggcaggtagcgcgtgaggccgcccgcggggacggccccggaagtctccgcgtggcgcgtcttccgggcacacttcctcggcccccgcggcccagaagcagcgcgggggccgagggaggtttcctcttgtctccctcccagggcaccgacggccccgcccgaggaggcggaagcggaggaggacgcggccccggcggcggaagaggcggcccccgcgggagtcggggccgaggaggaagaggcagaggaggaagaggcggaggccgccgaggacgtcaggggggtcccgggcccaccctggccgcgcccccccggccctgagtcggagggggggtgcgtcgccgccctcttggcccctgccggcgcgagggggggacgcgtggactggggggaggggttttcctggcccgacccgcgcctcttcctcggacgcaccgccgcctcctgctcgacagagacggcggaggggagcggggcggcgccggagggggcggcgccgcgggagggcccgtgcccaccctccacgcccggcccccccgagccgcgcgccaccgtcgcacgcgcccggcacagactctgttcttggttcgcggcctgagccagggacgagtgcgactggggcacacggcgcgcgtccgcggggcgggcggccggctccgccccgggggccggggcgcgggggccgggccccggaggcggcgctcgcacgcacggggccacggccgcgcgggggcgcgcgggtcccgacgcggccgaggacgcggggggcccggggcggggggcggagcctggcatgggcgccgcggggggcctgtggggagaggccgggggggagtcgctgatcactatggggtctctgttgtttgcaaggggggcgggtctgttgacaagggggcccgtccggcccctcggccgccccgcctccgcttcaacaaccccaaccccaaccccaacccccccggaggggccagacgccccccgcggcgccgcggctcgcgactggcgggagccgccgccaccgccgctgctgttggtggtggtgttggtgttactgctgccgtgtggcccgatgggcgccgaggggggcgctgtccgagccgcggccggctggggggctgcgtgagacgccccgcccgtcacggggggcgcggcggcgcctctgcgtgggggggcgcggggcgtccggcggggggcgggcggtacgtagtctgctgcaagagacaacggggggcgcgatcaggttacgccccctccccggcccgccctttcctcgcccccccgcccgcctattcctccctcccccctcctcctcctcctcccccagggtcctcgccgccccccgcctcaccgtcgtccaggtcgtcgtcatcctcgtccgtggtgggctcagggtgggtgggcgacagggccctcaccgtgtgcccccccagggtcaggtaccgcggggcgaaccgctgattgcccgtccagataaagtccacggccgtgcccgccctgacggcctcctcggcctccatgcgggtctgggggtcgttcacgatcgggacggtgctgaacgacccgctgggcgtgacgcccactatcaggtacaccagcttggcgttgcacagcgggcaggtgttgcgcaattgcatccaggttttcatgcacgggatgcagaagcggtgcatgcacgggaaggtgtcgcagcgcaggtggggcgcgatctcatccgtgcacacggcgcacacgtcgccctcgtcgctccccccgtcctctcgagggggggcgcccccgcaactgccggggtcttcctcgcgggggggactcccccccgagaccgcccccccatccacgccctgcggccccagcagccccgtctcgaacagttccgtgtccgtgctgtccgcctcggaggcggagtcgtcgtcatggtggtcggcgtccccccgcccccccacttcggtctccgcctcagagtcgctgctgtccggcaggtctcggtcgcagggaaacacccagacatccggggcgggctaaggggaaaaaagggggggcgggtaagactggggggggggatttcccgcgtcaatcagcgcccacgagttccccctctccccccccccgcctcacaaagtcctgcccccctgctggcctcggaagaggggggagaaaggggtctgcaaccaaaggtggtctgggtccgtcctttggatcccgacccctcttcttccctcttctcccgccctccagacgcaccggagtcgggggtcccacggcgtcccccaaatatggcgggcggctcctccccaccccctagatgcgtgtgagtaagggggccctgcgcatgagtcagtggggaccacgccccctaacacggcgaccccggtccctgtgtgtttgttgtgggggcgtgtctctgtgtatgagtcagggggtcccacggcgaccccgggccctgcgtctgagtcaaaggggccatgtgtatgtgttgggggggtctgtatatataaagtcagggggtcacatggcgacccccaacagggcgaccccggtccctgtatatatagggtcagggggttccgcgccccctaacatggcgcccccggtccctgtatatatagtgtcacggggttccacgccccctaacatggcgccccaacatggcgcccggctcccgtgtatgagcgggggtcccccaacatggcgccccccaatatggcgccccagacatggcgcccggcccctcacctcgcgttgggggcggccctcaggccggcgggtactcgctccggggcggggctccatgggggtcgtatgcggctggagggtcgcggacggagggtccctgggggtcgcaacgtaggcggggcttctgtggtgatgcggagagggggcggcccgagtctgcctggctgctgcgtctcgctccgagtgccgaggtgcaaatgcgaccagacggtcgggccagggctaacttataccccacgcctttcccctccccaaaggggcggcagtgacgattcccccaatggccgcgcgtcccaggggaggcaggcccaccgcggggcggccccgtccccggggaccaacccggcgcccccaaagaatatcattagcatgcacggcccggcccccgatttgggggaccaacccggtgtcccccaaagaaccccattagcatgcccctcccgccgacgcaacaggggcttggcctgcgtcggcgccccggggcttcccgccttcccgaagaaactcattaccatacccggaaccccaggggaccaatgcgggttcattgagcgacccgcgggccaatgcgcgaggggccgtgtgttccgccaaaaaagcaattagcataacccggaaccccaggggagtggttacgcgcggcgcgggaggcggggaataccggggttgcccattaagggccgcgggaattgccggaagcgggaagggcggccggggccgcccattaatgagtttctaattaccataccgggaagcggaacaaggcctcttgcaagtttttaattaccataccgggaagtgggcggcccggcccactgggcgggagttaccgcccagtgggccgggccccgacgactcggcggacgctggttggccgggccccgccgcgctggcggccgccgattggccagtcccaccctcagagggcgggcccgcctcgggggcgggccggctcccagcgtatatatgcgcggctcctgccatcgtctctccggagagcggcttggtgcggagctcccgggagctccgcggaagacccaggccgcctcgggtgtaacgttagaccgagttcgccgggccggctccgcgggccagggcccgggcacgggcctcgggccccaggcacggcccgatgaccgcctcggcctccgccacccggcgccggaaccgagcccggtcggcccgctcgcgggcccacgagccgcggcgcgccaggcgggcggccgaggcccagaccaccaggtggcgcacccggacgtggggcgagaagcgcacccgcgcgggggtcgcgggggtcgcgggggtcgcgggggtcgcgggggtcgcgggggtcgcgggggtcgcgggggtcgcggggggctccggcgccccctccccgcccgcgcgtcgcaggcgcaggcgcgccaggtgctctgcggtgacgcgcaggcggagggcgaggcgcggcggaaggcggaaggggcgtgagggggggtgggaggggttagccccgccccccgggcccgcgccgggcggtggggaccgggggcggggggcggcggcggtgggccgggcctctggcgccggctcgggcggggggctgtccggccagtcgtcgtcgtcgtcgtcgtcggacgcggactcgggaacgtggagccactggcgcagcagcagcgaacaagaaggcgggggcccactggcggggggcggcggcggggcggccgcgggcgcgctcctgaccacgggttccgagttgggcgtggaggttacctgggactgtgcggttgggaccgcgcccgtgggcccgggcggccgggggcggcgggggccgcgatggcggcggcggcgggccatggagacagagagcgtgccggggtggtagagtttgacaggcaagcatgtgcgtgcagaggcgagtagtgcttgcctgtctaactcgctagtctcggccgcggggggcccgggctgcccgccgccgcgctttaaagggccgcgcgcgacccccggggggtgtgtttcgggggggggcccgtttttggggtctggccgctcctcccccgctcctcccccgctcctcccccgctcctcccccgctcctcccccgctcctcccccgctcctccccgtctgtgggtggggctcctcccccgctcctccccgtctgtgggtggggctcctcccccgctgctccccgtctgtgggtggggctcctcccccgctcctccccgtctgtgggtggggctcctcccccgctgctccccgtctgtgggtggggctcctcccccgctcctccccgtctgtgggtggggctcctcccccgctcccgcggccccgccccccacgcccgccgcgcgcgcgcacgccgcccggaccgccgcccgctttttttgcgcgccgccccgcccgcggggggcccgggctgccacaggtgtaacaacaccaacagaacaccaacagcacggcgcaccggcgatccacacgtcacacgtcacgtcatccaccacacctgcccaacaacacaactcacagcgacaactcaccgcgcaacaactcctgttcctcatccacacgtcaccgcgcaccctcctgtcacacaccaccgccccagccccagccctccccagccccagccctccccagccccagccctccccagccccagccctccccagccccagccctccccagccccagccctccccagccccagccctccccagccccagccctccccagccccagccctccccagccccagccctccccagccccagccctccccagccccagccctccccagccccagccctccccagccccagccctccccagccccagccctccccagccccagccctccccagccccagccctccccagccccagccctccccagccccagccctccccagccccagccctccccagccccagccctccccagccccagccctccccagccccagccctccccagccccagccctccccagccccagccgcgtcccgcgctccctcgggggggttcgggcatctctacctcagtgccgccaatctcaggtcagagatccaaaccctccgggggcgcccgcgcaccaccaccgcccctcgccccctcccgcccctcgccccctcccgcccctcgccccctcccgcccctcgccccctcccgcccctcgccccctcccgcccctcgccccctcccgcccctcgccccctcccgcccctcgccccctcccgcccctcgaataaacaacgctactgcaaaactgaatcaggtcgttgtcgtttattgcgtcttcgggtttcacaagcgccccgccccgtcccggcccgttacagcaccccgtccccctcgaacgcgccgccgtcgtcttcgtcccaggcgccttcccagtccacaacttcccgccgcgggggcgtggccaagcccgcctccgcccccagcacctccacggcccccgccgccgccagcacggtgccgctgcggcccgtggccgaggcccagcgaatcccgggcggcgccggcggcagggcccccgggccgtcgtcgtcgtcgccgcgcagcaccagcgggggggcgtcgtcgtcgggctccagcagggcgcgggcgcaaaagtccctccgcggcccgcgccaccgggccgggccggcgcgcaccgcctcgcgccccagcgccacgtacacgggccgcagcggcgcgcccaggccccagcgcgcgcaggcgcggtgcgagtgggcctcctcctcgcagaagtccggcgcgccgggcgccatggcgtcggtggtccccgaggccgccgcccggccgtccagcgccggcagcacggcccggcggtactcgcgcggggacatgggcaccggcgtgtccgggccgaagcgcgtgcgcacgcggtagcgcacgttgccgccgcggcacaggcgcagcggcggcgcgtcggggtacaggcgcgcgtgcgcggcctccacgcgcgcgaagacccccgggccgaacacgcggcccgaggccagcaccgtgcggcgcaggtcccgcgccgccggccagcgcacggcgcactgcacggcgggcagcaggtcgcacgccaggtaggcgtgctgccgcgacaccgcgggcccgtcggcgggccagtcgcaggcgcgcacggtgttgaccacgatgagccgccggtcgccggcgctggcgagcagccccagaaactccacggccccggcgaaggccaggtcccgcgtggacagcagcagcacgccctgcgcgcccagcgccgacacgtcgggggcgccggtccagttgcccgcccaggcggccgtgtccggcccgcacagccggttggccagggccgccagcaggcaggacagcccgccgcgctcggcggaccactccggcggcccccccgaggccccgccgccggccaggtcctcgcccggcagcggcgagtacagcaccaccacgcgcacgtcctcggggtcggggatctggcgcatccaggccgccatgcggcgcagcgggcccgaggcgcgcagggggccaaagaggcggcccccggccgccccgtgggggtgggggttatcgtcgtcgtcgtcgccgccgccgcacgcggcctgggcggcgggggcgggcccggcgcaccgcgcggcgatcgaggccagggcccgcgggtcaaacatgagggccggtcgccaggggacggggaacagcgggtggtccgtgagctcggccacggcgcgcggggagcagtaggcctccagggcggcggccgcgggcgccgccgtgtggctgggccccgggggctgccgccgccagccgcccagggggtcggggccctcggcgggccggcgcgacagcgccacggggcgcgggcgggcctgcgccgcggcggcccgggccgccgcgggctgggcgggggcgggctcgggccccgggggcgtggaggggggcgcggggaggggggcgcgggcgtccgcgccgctcttcttcgtcttcgggggtcgcgggccgccgcctccgggcggccgggccgggccgggactcttgcgcttgcgcccctcccgcggcgcggcggaggcggcggcggccgccagcgcgtcggcggcgtccggtgcgctggccgccgccgccagcagggggcgcaggctctggttctcaaacagcaggtccgcggcggcggcggccgcggagctcggcaggcgcgggtcccgcggcagcgcggggcccagggccccggcgaccaggctcacggcgcgcacggcggccacggcggcctcgctgccgccggccacgcgcaggtccccgcgcaggcgcatgagcaccagcgcgtcgcgcacgaaccgcagctcgcgcagccacgcgcgcaggcggggcgcgtcggcgtgcggcggcggcggggaagcggggcccgcgggtccctccggccgcggggggctggcgggccgggccccggccagccccgggacggccgccaggtcgccgtcgaagccctcggccagcgcctccaggatcccgcggcaggcggccaggcactcgacggccacgcggccggcctgggcgcggcgcccggcgtcgtcgtcggcgtcggcgtggcgggcggcgtcggggtcgtcgccccccgcgggagaggcgggcgcggcggacagccgccccagggcggcgaggatccccgcggcgccgtacccggcgggcaccgcgcgctcgcccggtgcggcggcggcgacggcggcgaccccctcgtcatctgcgccggcgccggggctccccgcggcccccgtcagcgccgcgttctcgcgcgccaacaggggcgcgtaggcgcggcgcaggctggtcagcaggaagcccttctgcgcgcggtcgtatcggcggctcatggccacggcggccgccgcgtgcgccaggccccagccgaagcggccggccgccatggcgtagcccaggtggggcacggcccgcgccacgctgccggtgatgaaggagctgctgttgcgcgcggcgcccgagatccggaagcaggcctggtccagcgccacgtccccggggaccacgcgcgggttctggagccaccccatggcctccgcgtccggggtgtacagcagccgcgtgatcagggcgtactgctgcgcggcgtcgcccagctcgggcgcccacacggccgccggggcgcccgaggcctcgaaccggcgtcgcgcctcctccgcctcgggcgccccccagaggcccgggcggctgtcgcccaggccgccgtacagcacccgccccgggggcgggggcccggcgccgggccacggctccccgctgacgtacccgtcgcgatagcgcgcgtagaaggcgccggaggccgcgtcggcgtccagctcgacccgccggggctgcccggccgtgaagcggcccgtggcgtcgcggccggccaccgccgcgcgggcccggcggcgctcgatgcggcccgcggaggccgcgggggtcctcgccgccgcccggggcttgggcgcggcctcggagagggggggtggcccgggcgggggcggcgtccgcccgggggcttccggcgccgcgctcgacggaccccgcccgacggcccgcgcctcgcgtgcgcggtcggccgcgtcgttgccgtcgtcgtcctcgtcctcgtcggacgacgaggacgaagaggatgcggacgacgaggacgaggacccggagtccgacgaggtcgatgacgccgatggccgccgccggccgtgacgacgtctccgcggcggctgggccggcgggcgcggcgacaggcggtccgtggggtccggatacgcgccgcgtagcggggcctcccgttcgcggccccgggccggggcccggtcgccggcggcgtcggctgcgtcgtcgtactcgtccccgtcatcgtcgtcggctcgaaaggcgggggtccggggcggcgaggccgcggggtcgggcgtcgggatcgtccggacggcctcctctaccatggaggccagcagggccagctgtcgcggcgagacggcgtccccggcgtcctcgccggcgtcggtgcccgccgcgggggccctcccgtcccgccgggcgtcgtcgaggtcgtgggggtggtcggggtcgtggtcggggtcgtccccgccctcctccgtctccgcgccccacccgagggccccccgctcgtcgcggtctgggctcggggtgggcggcggcccgtcggtggggcccggggagccggggcgctgcttgttctccgacgccatcgccgatgcggggcgatcctccggggatacggctgcgacggcggacgtagcacggtaggtcacctacggactctcgatggggagggggcgagacccacggaccccgacgacccccgccatcgacgcggaactagcgcggaccggtcgatgtttgggtgggaaaaaggacagggacggccgatccccctcccgcgcttcgtccgcgtatcggcgtcccggcgcggcgagcgtctgacggtctgtctctggcggtcccgcgtcgggtcgtggatccgtgtcggcagccgcgctccgtgtggacgatcggggcgtcctcgggctcatatagtcccaggggccggcgggaaggaggagcagcggaggccgccggccccccgccccccaggcgggcccgccccgaacggaattccattatgcacgaccccgccccgacgccggcacgccgggggcccgtggccgcggcccgttggtcgaacccccggccccgcccatccgcgccatctgccatgggcggggcgcgagggcgggtgggcccgcgccccgccccgcatggcatctcattaccgcccgatccggcggtttccgcttccgttccgcatgctaacgaggaacgggcagggggcggggcccgggccccgacttcccggttcggcggtaatgagatacgagccccgcgcgcccgttggccgtccccgggcccccggtcccgcccgccggacgccgggaccaacgggacggcgggcggcccaagggccgcccgccttgccgcccccccattggccagcgggcgggaccgccccaagggggcggggccgccgggtaaaagaagtgagaacgcgaagcgttcgcacttcgtcccaatatatatatattattagggcgaagtgcgagcactggcgccgtgcccgactccgcgccggccccgggggcgggcccgggcggcggggggcgggtctctccggcgcacataaaggcccggcgcgaccgacgcccgcagacggcgccggccacgaacgacgggagcggctgcggagcacgcggaccgggagcgggagtcgcagagggccgtcggagcggacggcgtcggcatcgcgacgccccggctcgggatcgggatcgcatcggaaagggacacgcggacgcgggggggaaagacccgccaaccccacccacgaaacacaggggacgcaccccgggggcctccgacgacagaaacccaccggtccgccttttttgcacgggtaagcaccttgggtgggcggaggagggcggaggagggcggaggagggtggggacgcgggggcggaggagggggctcacccgcgttcgtgccttcccgcaggaggaacgccctcgtcgaggcgaccggcggcgaccgttgcgtggaccgcttccttcgcgtcggcggggcgaccggcggcgaccgttgcgtggaccgcttcctgctcgtcgggcggggggaagccactgtggtcctccgggacgttttctggatggccgacatttccccaggcgcttttgcgccttgtgtaaaagcgcggcgtcccgctctccgatccccgcccctgggcacgcgcaagcgcaagcgcccttcccgccccctctcatcggagtctgaggtagaatccgatacagccttggagtctgaggtcgaatccgagacagcatcggattcgaccgagtctggggaccaggatgaagccccccgcatcggtggccgtagggccccccggaggcttggggggcggttttttctggacatgtcggcggaatccaccacggggacggaaacggatgcgtcggggtcggacgaccccgacgacacgtccgactggtcttatgacgacattcccccacgacccaagcgggcccgggtaaacctgcggctcacgagctctcccgatcggcgggatggggttatttttcctaagatggggcgggtccggtctacccgggaaacgcagccccgggcccccaccccgtcggccccaagcccaaatgcaatgctacggcgctcggtgcgccaggcccagaggcggagcagcgcacgatggacccccgacctgggctacatgcgccagtgtatcaatcagctgtttcgggtcctgcgggtcgcccgggacccccacggcagtgccaaccgcctgcgccacctgatacgcgactgttacctgatgggatactgccgagcccgtctggccccgcgcacgtggtgccgtttgctgcaggtgtccggcggaacctggggcatgcacctgcgcaacaccatacgggaggtggaggctcgattcgacgccaccgcggaacccgtgtgcaagcttccttgtttggagaccagacggtacggcccggagtgtgatcttagtaatctcgagattcatctcagcgcgacaagcgatgatgaaatctccgatgccaccgatctggaggccgccggttcggaccacacgctcgcgtcccagtccgacacggaggatgccccctcccccgttacgctggaaaccccagaaccccgcgggtccctcgctgtgcgtctggaggatgagtttggggagtttgactggaccccccaggagggctcccagccctggctgtctgcggtcgtggccgataccagctccgtggaacgcccgggcccatccgattctggggcgggtcgcgccgcagaagaccgcaagtgtctggacggctgccggaaaatgcgcttctccaccgcctgcccctatccgtgcagcgacacgtttctccggccgtgagtccggtcgccccgacccccttgtatgtccccaaaataaaagaccaaaatcaaagcgtttgtcccagcgtcttaatggcgggaagggcggagagaaacagaccacgcgtacatggggggtgtttgggggtttattgacatcggggctacagggtggtaaccggatagcagatgtgaggaagtctgggccgttcgccgcgaacggcgatcagagggtccgtttcttgcggaccacggcccggtgatgtgggttgctcgtctgggatctcgggcatgcccatacacgcacaacacggacgccgcaccggatgggacgtcgtaagggggcctggggtagctgggtggggtttgtgcagagcaatcagggaccgcagccagcgcatacaatcgcgctcccgtccgtttgtcccgggcagtaccacgccgtactggtattcgtaccggctgagcagggtctccagggggtggttgggggccgcggggaacggggtccacgccacggtccactcgggcaaaaaccgagtcggcacggcccacggttctcccacccacgcgtctggggtcttgatggcgataaatcttaccccgagccggattttttgggcgtattcgagaaacggcacacacagatccgccgcgcctaccacccacaagtggtagaggcgaggggggctgggttggtctcggtgcagcagtcggaagcacgccacggcgtccacgacctcggtgctctccaaggggctgtcctccgcaaacaggcccgtggtggtgtttggggggcagcgacaggacctagtgcgcacgatcgggcgggtgggtttgggtaagtccatcagcggctcggccaaccgtcgaaggttggccggacgaacgacgaccggggtacccaggggttctgatgccaaaatgcggcactgcctaagcaggaagctccacagggccgggcttgcgtcgacggaagtccggggcagggcgttgttctggtcaaggagggtcattacgttgacgacaacaacgcccatgttggtatattacaggcccgtgtccgatttggggcacttgcagatttgtaaggccacgcacggcggggagacaggccgacgcgggggctgctctaaaaatttaagggccctacggtccacagacccgccttcccgggggggcccttggagcgaccggcagcggaggcgtccgggggaggggagggtgatttacgggggggtaggtcagggggtgggtcgtcaaactgccgctccttaaaaccccggggcccgtcgttcggggtgctcgttggttggcactcacggtgcggcgaatggcctgtcgtaagttttgtcgcgtttacgggggacagggcaggaggaaggaggaggccgtcccgccggagacaaagccgtcccgggtgtttcctcatggccccttttataccccaaccgaggacgcgtgcctggactccccgcccccggagacccccaaaccttcccacaccacaccacccggcgatgccgagcgcctgtgtcatctgcaggagatcctggcccagatgtacggaaaccaggactaccccatagaggacgaccccagcgcggatgccgcggacgatgtcgacgaggacgccccggacgacgtggcctatccggaggaatacgcagaggagctttttctgcccggggacgcgcccggtccccttatcggggccaacgaccacatccctcccccgtgtggcgcatctccccccggtatacgacgacgcagccgggatgagattggggccacgggatttaccgcggaagaactggacgccatggacagggaggcggctcgagccatcagccgcggcggcaagcccccctcgaccatggccaagctggtgactggcatgggctttacgatccacggagcgctcaccccaggatcggaggggtgtgtctttgacagcagccacccagattacccccaacgggtaatcgtgaaggcggggtggtacacgagcacgagccacgaggcgcgactgctgaggcgactggaccaccccgcgatcctgcccctcctggacctgcatgtcgtctccggggtcacgtgtctggtcctccccaagtaccaggccgacctgtatacctatctgagtaggcgcctgaacccgctgggacgcccgcagatcgcagcggtctcccggcagctcctaagcgccgttgactacattcaccgccagggcattatccaccgcgacattaagaccgaaaatatttttattaacacccccgaggacatttgcctgggggactttggtgccgcgtgcttcgtgcagggttcccgatcaagccccttcccctacggaatcgccggaaccatcgacaccaacgcccccgaggtactggccggggatccgtataccaccaccgtcgacatttggagcgccggtctggtgatcttcgagactgccgtccacaacgcgtccttgttctcggccccccgcggccccaaaaggggcccgtgcgacagtcagatcacccgcatcatccgacaggcccaggtccacgttgacgagttttccccgcatccagaatcgcgcctcacctcgcgctaccgctcccgcgcggccgggaacaatcgcccgccgtacacccgaccggcctggacccgctactacaagatggacatagacgtcgaatatctggtttgcaaagccctcaccttcgacggcgcgcttcgccccagcgccgcagagctgctttgtttgccgctgtttcaacagaaatgaccgcccccagggggcggtgctgtttgcgggttggcacaaaaagaccccgacccgcgtctgtggtgtttttggcatcatgtcgccgggcgccatgcgtgccgttgttcccattatcccattccttttggttcttgtcggtgtatcgggggttcccaccaacgtctcctccaccacccaaccccaactccagaccaccggtcgtccctcgcatgaagcccccaacatgacccagaccggcaccaccgactctcccaccgccatcagccttaccacgcccgaccacacaccccccatgccaagtatcggactggaggaggaggaagaggaggagggggccggggacggcgaacatcttgaggggggagatgggacccgtgacaccctaccccagtccccgggcccagccttcccgttggctgaggacgtcgagaaggacaaacccaaccgtcccgtagtcccatcccccgatcccaacaactcccccgcgcgccccgagaccagtcgcccgaagacaccccccaccattatcgggccgctggcaactcgccccacgacccgactcacctcaaagggacgacccttggttccgacgcctcaacataccccgctgttctcgttcctcactgcctcccccgccctggacaccctcttcgtcgtcagcaccgtcatccacaccttatcgtttttgtgtattggtgcgatggcgacacacctgtgtggcggttggtccagacgcgggcgacgcacacaccctagcgtgcgttacgtgtgcctgccgtccgaacgcgggtagggtatggggcgggggatggggagagcccacacgcggaaagcaagaacaataaaggcggtggtatctagttgatatgcatctctgggtgtttttggggtgtggcggacgcggggcggtcattggacggggtgcagttaaatacatgcccgggacccatgaagcatgcgcgacttccgggcctcggaacccacccgaaacggccaacggacgtctgagccaggcctggctatccggagaaacagcacacgacttggcgttctgtgtgtcgcgatgtctctgcgcgcagtctggcatctggggcttttgggaagcctcgtgggggctgttcttgccgccacccatcggggacctgcggccaacacaacggaccccttaacgcacgccccagtgtcccctcaccccagccccctggggggctttgccgtccccctcgtagtcggtgggctgtgcgccgtagtcctgggggcggcgtgtctgcttgagctcctgcgtcgtacgtgccgcgggtgggggcgttaccatccctacatggacccagttgtcgtataattccccccccccccttctccgcatgggtgatgtcgggtccaaactcccgacaccaccagctggcatggtataaatcaccggtgcgccccccaaaccatgtccggcagggggatgggggggcgaatgcggagggcacccaacaacaccgggctaaccaggaaatccgtggccccggcccccaataaagatcgcggtagcccggccgtgtgacactatcgtccataccgaccacaccgacgaatcccctaagggggaggggccattttacgaggaggaggggtataacaaagtctgtctttaaaaagcaggggttagggagttgttcggtcataagcttcagcgcgaacgaccaactaccccgatcatcagttatccttaaggtctcttttgtgtggtgcgttccggtatggggggggctgccgccaggttgggggccgtgattttgtttgtcgtcatagtgggcctccatggggtccgcggcaaacatgccttggcggatgcctctctcaagatggccgaccccaatcgctttcgcggcaaagaccatccggtcctggaccagctgaccgaccctccgggggtccggcgcgtgtaccacatccaggcgggcctaccggacccgttccagccccccagcctcccgatcacggtttactacgccgtgttggagcgcgcctgccgcagcgtgctcctaaacgcaccgtcggaggccccccagattgtccgcggggcctccgaagacgtccggaaacaaccctacaacctgaccatcgcttggtttcggatgggaggcaactgtgctatccccatcacggtcatggagtacaccgaatgctcctacaacaagtctctgggggcctgtcccatccgaacgcagccccgctggaactactatgacagcttcagcgccgtcagcgaggataacctggggttcctgatgcacgcccccgcgtttgagaccgccggcacgtacctgcggctcgtgaagataaacgactggacggagattacacagtttatcctggagcaccgagccaagggctcctgtaagtacgccctcccgctgcgcatccccccgtcagcctgcctgtccccccaggcctaccagcagggggtgacggtggacagcatcgggatgctgccccgcttcatccccgagaaccagcgcaccgtcgccgtatacagcttgaagatcgccgggtggcacgggcccaaggccccatacacgagcaccctgctgcccccggagctgtccgagacccccaacgccacgcagccagaactcgccccggaagaccccgaggattcggccctcttggaggaccccgtggggacggtggcgccgcaaatcccaccaaactggcacataccgtcgatccaggacgccgcgacgccttaccatcccccggccaccccgaacaacatgggcctgatcgccggcgcggtgggcggcagtctcctggcagccctggtcatttgcggaattgtgtactggatgcgccgccgcactcaaaaagccccaaagcgcatacgcctcccccacatccgggaagacgaccagccgtcctcgcaccagcccttgttttactagatacccccccttaatgggtgcgggggggtcaggtctgcggggttgggatgggaccttaactccatataaagcgagtctggaaggggggaaaggcggacagtcgataagtcggtagcgggggacgcgcacctgttccgcctgtcgcacccacagctttttttttgcgaaccgtcccgttccgggatgccgtgccgcccgttgcagggcctggtgctcgtgggcctctgggtctgtgccaccagcctggttgtccgtggccccacggtcagtctggtatcaaactcatttgtggacgccggggccttggggcccgacggcgtagtggaggaagacctgcttattctcggggagcttcgctttgtgggggaccaggtcccccacaccacctactacgatggggtcgtagagctgtggcactaccccatgggacacaaatgcccacgggtcgtgcatgtcgtcacggtgaccgcgtgcccacgtcgccccgccgtggctttcgccctgtgtcgcgcgaccgacagcactcacggccccgcatatcccaccctggagctgaatctggccaaacagccgcttttgcgggtccggagggcgacgcgtgactatgccggggtgtacgtgttacgcgtatgggtcggggacgcaccaaacgccagcctgtttgtcctggggatggccatagccgccgaagggactctggcgtacaacggctcggcccatggctcctgcgacccgaaactgcttccgtattcggccccgcgtctggccccggcgagcgtataccaacccgcccctaacccggcctccaccccctcgaccaccacctccaccccctcgaccaccacctccaccccctcgaccaccatccccgctccccaagcatcgaccacacccttccccacgggagacccaaaaccccaacctcacggggtcaaccacgaacccccatcgaatgccacgcgagcgacccgcgactcgcgatacgcgctaacggtgacccagataatccagatagccatccccgcgtccattatagccctggtgtttctggggagctgtatttgctttatacacagatgtcaacgccgctaccgacgctcccgccgcccgatttacaacccccagatacccactggcatctcatgcgcggtgaacgaagcggccatggcccgcctcggagccgagctcaaatcgcatccgagcacccccccccaaatcccggcgccggtcgtcacgcacaccaatgccctccctgacggccatcgccgaagagtcggagcccgcgggggcggctgggcttccgacgccccccgtggaccccacgacattcaccccaacgcctcccctgttggtataggtccacggccactggccgggggcaccacataaccgaccgcagtcactgagttgggaataaaccggtattatttacctatatacgtgtatgtccatttcttccccccccccccccccggaaaccaaagaaggaaacaaagaatggatgggaggagttcaggaagccggggagagggcccgcggcgcatttaaggcgttgttgtgttgactttggcttcttctggcgggttggtgcggtgctgtttgttgggctcccattttacccgaagatcggctgctatccccgggacatggatcgcggggcggtggtggggtttcttctcggtgtttgtgttgtatcgtgtttggcgggaacgcccaaaacgtcctggagacgggtgagtgtcggcgaggacgtttcgttgcttccagctccggggcctacggggcgcggcccgacccagaaactactatgggccgtggaacccctggatgggtgcggccccttacacccgtcgtgggtctcgctgatgccccccaagcaggtgcccgagacggtcgtggatgcggcgtgcatgcgcgctccggtcccgctggcgatggcgtacgcccccccggccccatctgcgaccgggggtctacggacggacttcgtgtggcaggagcgcgcggccgtggttaaccggagtctggttatttacggggtccgagagacggacagcggcctgtataccctgtctgtgggcgacataaaggacccggctcgccaagtggcctcggtggtcctggtggtgcaaccggccccagttccgaccccacccccgaccccagccgattacgacgaggatgacaatgacgagggcgagggcgaggacgaaagtctagccggcactcccgccagcgggaccccccggctcccgcctccccccgcccccccgaggtcttggcccagcgcccccgaagtctcacacgtgcgtggggtgaccgtgcgtatggagactccggaagctatcctgttttcccccggggaggcgtttagcacgaacgtctccatccatgccatcgcccacgacgaccagacctacaccatggacgtcgtctggttgaggttcgacgtgccgacctcgtgtgccgagatgcgaatatacgaatcgtgtctgtatcacccgcagctcccagagtgtctgtccccggccgacgctccgtgcgccgcgagtacgtggacgtctcgcctggccgtccgcagctacgcggggtgttccagaacaaaccccccgccgcgctgttcggccgaggctcacatggagcccttcccggggctggcgtggcaggcggcctccgtcaatctggagttccgggacgcgtccccacaacactccggcctgtatctgtgcgtggtgtacgtcaacgaccatattcacacatggggccacattaccatcagcaccgcggcgcagtaccggaacgcggtggtggaacagcccctcccacagcgcggcgcggatttggccgagcccacccacccgcacgtcggggcccctccccacgcgcccccaacccacggcgccctgcggttaggggcggtgatgggggccgccctgctgctgtctgcgctggggttgtcggtgtgggcgtgtatgacctgttggcgcaggcgtgcctggcgggcggttaaaagcagggcctcgggtaaggggcccacgtacattcgcgtggccgacagcgagctgtacgcggactggagctcggacagcgagggagaacgcgaccaggtcccgtggctggcccccccggagagacccgactctccctccaccaatggatccggctttgagatcttatcaccaacggctccgtctgtatacccccgtagcgatgggcatcaatctcgccgccagctcacaacctttggatccggaaggcccgatcgccgttactcccaggcctccgattcgtccgtcttctggtaaggcgccccatcccgaggccccacgtcggtcgccgaactgggcgaccgccggcgaggtggacgtcggagacgagctaatcgcgatttccgacgaacgcggacccccccgacatgaccgcccgcccctcgccacgtcgaccgcgccctcgccacacccgcgacccccgggctacacggccgttgtctccccgatggccctccaggctgtcgacgccccctccctgtttgtcgtctggctggccgctcggtggctccggggggcttccggcctgggggccgtcctgtgtgggattgcgtggtatgtgacgtcaattgcccgaggcgcataaagggccggtggtccgcctagccgcagcaaattaaaaatcgtgagtcactgcgaccgcaacttcccacccggagctttcttccggcctcgatgacgtcccggctctccgatcccaactcctcagcgcgatccgacatgtccgtgccgctttatcccacggcctcgccagtttcggtcgaagcctactactcggaaagcgaagacgaggcggccaacgacttcctcgtacgcatgggccgccaacagtcggtattaaggcgttgacgcagacgcacccgctgcgtcggcatggtgatcgcctgtctcctcgtggccgttctgtcgggcggatttggggcgctcctgatgtggctgctccgctaaaagaccgcatcgacacgcgcgtccttcttgtcgtctctcttcccccccatcaccccgcaatttgcacccagcctttaactacattaaattgggttcgattggcaatgttgtctcccggttgatttttgggtgggtggggagtgggtgggtggggagtgggtgggtggggagtgggtgggtggggagtggcaaggaagaaacaagcccgaccaccagacagaaaatgtaaccatacccaaaccgactctgggggctgtttgtggggtcggaaccataggatgaacaaaccaccccgtacctcccgcacccttgggtgcgggtggctcataggcatctgtccggtatgggttgttccccacccactcgcgttcggacgtcttagaatcatggcggttttctatgccgacatcggttttctcccccgcaataagacacgatgcgataaaatctgtttgtgaaatttattaagggtacaaattgccctagcacaggggtggggttagggccgggtccccacacccaaacgcaccaaacagatgcaggcagtgggtcgagtacagccccgcgtacgaacacgtcgatgcgtgtgtcagacagcaccagaaagcacaggccatcaacaggtcgtgcatgtgtcggtgggtttggacgcggggggccatggtggtgataaagttaatggccgccgtccgccagggccacaggggcgacgtctcttggttggcccggagccactgggtgtggaccagccgcgcgtggcggcccaacatggcccctgtagccgggggcgggggatcgcgcacgtttgcagcgcacatgcgagacacctcgaccacggttcggaagaaggcccggtggtccgcgggcaacatcaccaggtgcgcaagcgcccgggcgtccagagggtagagccctgagtcatccgaggttggctcatcgcccgggtcatgccgcaagtgcgtgtgggttgggcttccggtgggcgggacgcgaaccgcggtgtggagcccgacgcgggcccgagcgtacgctccatcttgtggggagaaggggtctgggctcgccaggggggcatacttgcccgggctatacagacccgcgagccgtacgtggttcgcggggggtgcgtggggtccggggctcccggggaggccggggctcccggggttgtcgtggatccctggggtcacgcggtaccctggggtctctgggagctcgcggtactctgggttccctaggttctcggggtggtcgcggaacccggggctcccggggaacacgcggtgtcctggggaatgttggcggtcggacggcttcagatggcttcgagatcgtagtgtccgcaccgactcgtagtagacccgaatctccacattgccccgccgcttgatcattatcaccccgttgcgggggtccggagatcatgcgcgggtgtcctcgatgtgcgtgaacacctctggggtgcatgccggcggacggcacgccttttaagtaaacatctgggtcgcccggcccaactggggccgggggttgggtctggctcatctcgagagccacggggggaaccaccctccgcccagagactcgggcgatggtcgtacccgggactcaacgggttaccggattacggggactgtcggtcacggtcccgccggttcttcgatgtgccacacccaaggatgcgttgggggcgatttcgggcagcagcccgggagagcgcagcaggggacgctccgggtcgtgcacggcggttctggccgcctcccggtcctcacgcccccttttattgatctcatcgcgtacgtcggcgtacgtcctgggtccaacccgcatgttgtccaggaaggtgtccgccatttccagggcccacgacatgctccccgccgacgcgaaggaagcggtccacgcaacggtcgccgccggtcgcctcgacgagggcgttcctcctgcgggaaggcacgaacgcgggtgagccccctcctccgcccccgcgtccccaccctcctccgccctcctccgccctcctccgcccacccaaggtgcttacccgtgcaaaaaaggcggaccggtgggtttctgtcgtcggaggcccccggggtgcgtcccctgtgtttcgtgggtggggttggcgggtctttcccccccgcgtccgcgtgtccctttccgatgcgatcccgatcccgagccggggcgtcgcgatgccgacgccgtccgctccgacggccctctgcgactcccgctcccggtccgcgtgctccgcagccgctcccgtcgttcgtggccggcgccgtctgcgggcgtcggtcgcgccgggcctttatgtgcgccggagagacccgccccccgccgcccgggcccgcccccggggccggcgcggagtcgggcacggcgccagtgctcgcacttcgccctaataatatatatatattgggacgaagtgcgaacgcttcgcgttctcacttcttttacccggcggccccgcccccttggggcggtcccgcccgctggccaatgggggggcggcaaggcgggcggcccttgggccgcccgccgtcccgttggtcccggcgtccggcgggcgggaccgggggcccggggacggccaacgggcgcgcggggctcgtatctcattaccgccgaaccgggaagtcggggcccgggccccgccccctgcccgttcctcgttagcatgcggaacggaagcggaaaccgccggatcgggcggtaatgagatgccatgcggggcggggcgcgggcccacccgccctcgcgccccgcccatggcagatggcgcggatgggcggggccgggggttcgaccaacgggccgcggccacgggcccccggcgtgccggcgtcggggcggggtcgtgcataatggaattccgttcggggcgggcccgcctggggggcggggggccggcggcctccgctgctcctccttcccgccggcccctgggactatatgagcccgaggacgccccgatcgtccacacggagcgcggctgccgacacggatccacgacccgacgcgggaccgccagagacagaccgtcagacgctcgccgcgccgggacgccgatacgcggacgaagcgcgggagggggatcggccgtccctgtcctttttcccacccaaacatcgaccggtccgcgctagttccgcgtcgatggcgggggtcgtcggggtccgtgggtctcgccccctccccatcgagagtccgtaggtgacctaccgtgctacgtccgccgtcgcagccgtatccccggaggatcgccccgcatcggcgatggcgtcggagaacaagcagcgccccggctccccgggccccaccgacgggccgccgcccaccccgagcccagaccgcgacgagcggggggccctcgggtggggcgcggagacggaggagggcggggacgaccccgaccacgaccccgaccacccccacgacctcgacgacgcccggcgggacgggagggcccccgcggcgggcaccgacgccggcgaggacgccggggacgccgtctcgccgcgacagctggccctgctggcctccatggtagaggaggccgtccggacgatcccgacgcccgaccccgcggcctcgccgccccggacccccgcctttcgagccgacgacgatgacggggacgagtacgacgacgcagccgacgccgccggcgaccgggccccggcccggggccgcgaacgggaggccccgctacgcggcgcgtatccggaccccacggaccgcctgtcgccgcgcccgccggcccagccgccgcggagacgtcgtcacggccggcggcggccatcggcgtcatcgacctcgtcggactccgggtcctcgtcctcgtcgtccgcatcctcttcgtcctcgtcgtccgacgaggacgaggacgacgacggcaacgacgcggccgaccgcgcacgcgaggcgcgggccgtcgggcggggtccgtcgagcgcggcgccggaagcccccgggcggacgccgcccccgcccgggccaccccccctctccgaggccgcgcccaagccccgggcggcggcgaggacccccgcggcctccgcgggccgcatcgagcgccgccgggcccgcgcggcggtggccggccgcgacgccacgggccgcttcacggccgggcagccccggcgggtcgagctggacgccgacgcggcctccggcgccttctacgcgcgctatcgcgacgggtacgtcagcggggagccgtggcccggcgccgggcccccgcccccggggcgggtgctgtacggcggcctgggcgacagccgcccgggcctctggggggcgcccgaggcggaggaggcgcgacgccggttcgaggcctcgggcgccccggcggccgtgtgggcgcccgagctgggcgacgccgcgcagcagtacgccctgatcacgcggctgctgtacaccccggacgcggaggccatggggtggctccagaacccgcgcgtggtccccggggacgtggcgctggaccaggcctgcttccggatctcgggcgccgcgcgcaacagcagctccttcatcaccggcagcgtggcgcgggccgtgccccacctgggctacgccatggcggccggccgcttcggctggggcctggcgcacgcggcggccgccgtggccatgagccgccgatacgaccgcgcgcagaagggcttcctgctgaccagcctgcgccgcgcctacgcgcccctgttggcgcgcgagaacgcggcgctgacgggggccgcggggagccccggcgccggcgcagatgacgagggggtcgccgccgtcgccgccgccgcaccgggcgagcgcgcggtgcccgccgggtacggcgccgcggggatcctcgccgccctggggcggctgtccgccgcgcccgcctctcccgcggggggcgacgaccccgacgccgcccgccacgccgacgccgacgacgacgccgggcgccgcgcccaggccggccgcgtggccgtcgagtgcctggccgcctgccgcgggatcctggaggcgctggccgagggcttcgacggcgacctggcggccgtcccggggctggccggggcccggcccgccagccccccgcggccggagggacccgcgggccccgcttccccgccgccgccgcacgccgacgcgccccgcctgcgcgcgtggctgcgcgagctgcggttcgtgcgcgacgcgctggtgctcatgcgcctgcgcggggacctgcgcgtggccggcggcagcgaggccgccgtggccgccgtgcgcgccgtgagcctggtcgccggggccctgggccccgcgctgccgcgggacccgcgcctgccgagctccgcggccgccgccgccgcggacctgctgtttgagaaccagagcctgcgccccctgctggcggcggcggccagcgcaccggacgccgccgacgcgctggcggccgccgccgcctccgccgcgccgcgggaggggcgcaagcgcaagagtcccggcccggcccggccgcccggaggcggcggcccgcgacccccgaagacgaagaagagcggcgcggacgcccgcgcccccctccccgcgcccccctccacgcccccggggcccgagcccgcccccgcccagcccgcggcggcccgggccgccgcggcgcaggcccgcccgcgccccgtggcgctgtcgcgccggcccgccgagggccccgaccccctgggcggctggcggcggcagcccccggggcccagccacacggcggcgcccgcggccgccgccctggaggcctactgctccccgcgcgccgtggccgagctcacggaccacccgctgttccccgtcccctggcgaccggccctcatgtttgacccgcgggccctggcctcgatcgccgcgcggtgcgccgggcccgcccccgccgcccaggccgcgtgcggcggcggcgacgacgacgacgataacccccacccccacggggcggccgggggccgcctctttggccccctgcgcgcctcgggcccgctgcgccgcatggcggcctggatgcgccagatccccgaccccgaggacgtgcgcgtggtggtgctgtactcgccgctgccgggcgaggacctggccggcggcggggcctcgggggggccgccggagtggtccgccgagcgcggcgggctgtcctgcctgctggcggccctggccaaccggctgtgcgggccggacacggccgcctgggcgggcaactggaccggcgcccccgacgtgtcggcgctgggcgcgcagggcgtgctgctgctgtccacgcgggacctggccttcgccggggccgtggagtttctggggctgctcgccagcgccggcgaccggcggctcatcgtggtcaacaccgtgcgcgcctgcgactggcccgccgacgggcccgcggtgtcgcggcagcacgcctacctggcgtgcgacctgctgcccgccgtgcagtgcgccgtgcgctggccggcggcgcgggacctgcgccgcacggtgctggcctcgggccgcgtgttcggcccgggggtcttcgcgcgcgtggaggccgcgcacgcgcgcctgtaccccgacgcgccgccgctgcgcctgtgccgcggcggcaacgtgcgctaccgcgtgcgcacgcgcttcggcccggacacgccggtgcccatgtccccgcgcgagtaccgccgggccgtgctgccggcgctggacggccgggcggcggcctcggggaccaccgacgccatggcgcccggcgcgccggacttctgcgaggaggaggcccactcgcaccgcgcctgcgcgcgctggggcctgggcgcgccgctgcggcccgtgtacgtggcgctggggcgcgaggcggtgcgcgccggcccggcccggtggcgcgggccgcggagggacttttgcgcccgcgccctgctggagcccgacgacgacgcccccccgctggtgctgcgcggcgacgacgacgacggcccgggggccctgccgccggcgccgcccgggattcgctgggcctcggccacgggccgcagcggcaccgtgctggcggcggcgggggccgtggaggtgctgggggcggaggcgggcttggccacgcccccgcggcgggaagttgtggactgggaaggcgcctgggacgaagacgacggcggcgcgttcgagggggacggggtgctgtaacgggccgggacggggcggggcgcttgtgaaacccgaagacgcaataaacgacaacgacctgattcagttttgcagtagcgttgtttattcgaggggcgggagggggcgaggggcgggagggggcgaggggcgggagggggcgaggggcgggagggggcgaggggcgggagggggcgaggggcgggagggggcgaggggcgggagggggcgaggggcgggagggggcgaggggcggtggtggtgcgcgggcgcccccggagggtttggatctctgacctgagattggcggcactgaggtagagatgcccgaacccccccgagggagcgcgggacgcggctggggctggggagggctgggctgggagggctggggctggggagggctggggctggggagggctggggctggggagggctggggctggggagggctggggctggggagggctggggctggggagggctggggctggggagggctggggctggggagggctggggctggggagggctggggctggggagggctggggctggggagggctggggctggggagggctggggctggggagggctggggctggggagggctggggctggggagggctggggctggggagggctggggctggggagggctggggctggggagggctggggctggggagggctggggctggggagggctggggctggggagggctggggctggggagggctggggctggggagggctggggctggggagggctggggctggggcggtggtgtgtgacaggagggtgcgcggtgacgtgtggatgaggaacaggagttgttgcgcggtgagttgtcgctgtgagttgtgttgttgggcaggtgtggtggatgacgtgacgtgtgacgtgtggatcgccggtgcgccgtgctgttggtgttctgttggtgttgttacacctgtggcagcccgggccccccgcgggcggggcggcgcgcaaaaaaagcgggcggcggtccgggcggcgtgcgcgcgcgcggcgggcgtggggggcggggccgcgggagcgggggaggagccccacccacagacggggaggagcgggggaggagccccacccacagacggggagcagcgggggaggagccccacccacagacggggaggagcgggggaggagccccacccacagacggggagcagcgggggaggagccccacccacagacggggaggagcgggggaggagccccacccacagacggggaggagcgggggaggagcgggggaggagcgggggaggagcgggggaggagcgggggaggagcgggggaggagcggccagaccccaaaaacgggcccccccccgaaacacaccccccgggggtcgcgcgcggccctttaaagcgcggcgggc

SEQ ID NO: 858 - DNA, 310 bp, synthetic construct
  misc_feature 1..310: note = miR-TS Cassette in ICP4
  source 1..310: mol_type = other DNA
attactacgcgtattcttaagcaataaccgaaaagagaccggttcactgtggccaccaaacaccattgtcacactccataacggcattcaccgcgtgccttagacccaaacaccattgtcacactccacacgaaagagaccggttcactgtggatacctacgcgtattcttaagcaataagcctggcattcaccgcgtgccttaagataaagagaccggttcactgtggtaacctacgcgtattcttaagcaataattatggcattcaccgcgtgccttactcacaaacaccattgtcacactccagaca

SEQ ID NO: 859 - DNA, 313 bp, synthetic construct
  misc_feature 1..313: note = miR-TS Cassette in ICP8
  source 1..313: mol_type = other DNA
caacgcaatcagctaactacactgcctaaagggcattcaccgcgtgccttagacccgaccatggctgtagactgttattgaatgctttttggggtaagggcttgatcgcaatcagctaactacactgcctaccaggcattcaccgcgtgccttaatagatgctttttggggtaagggcttgtgacgaccatggctgtagactgttattatggcattcaccgcgtgccttaatggatgctttttggggtaagggcttctgacgaccatggctgtagactgttaggccgcaatcagctaactacactgcctcacg

SEQ ID NO: 860 - DNA, 322 bp, synthetic construct
  misc_feature 1..322: note = miR-TS Cassette in ICP27
  source 1..322: mol_type = other DNA
cagtgatggcagtggagttagtgattggggcaaagagaccggttcactgtggggaactacgcgtattcttaagcaataacaccgcaatcagctaactacactgccttaacaaagagaccggttcactgtggagtggatggcagtggagttagtgattgattactacgcgtattcttaagcaataatgacgcaatcagctaactacactgcctccgcctacgcgtattcttaagcaataatccagatggcagtggagttagtgattgcccgaaagagaccggttcactgtggcacagcaatcagctaactacactgcctataa

SEQ ID NO: 861 - RNA, 23 nt, synthetic construct
  source 1..23: mol_type = other RNA
taggcagtgtcattagctgattg

SEQ ID NO: 862 - RNA, 22 nt, synthetic construct
  source 1..22: mol_type = other RNA
caatcactaactccactgccat

SEQ ID NO: 863 - RNA, 23 nt, synthetic construct
  source 1..23: mol_type = other RNA
aggcagtgtagttagctgattgc

SEQ ID NO: 864 - RNA, 21 nt, synthetic construct
  source 1..21: mol_type = other RNA
ccacagtgaaccggtctcttt

SEQ ID NO: 865 - RNA, 22 nt, synthetic construct
  source 1..22: mol_type = other RNA
aagcccttaccccaaaaagcat

SEQ ID NO: 866 - RNA, 22 nt, synthetic construct
  source 1..22: mol_type = other RNA
taacagtctacagccatggtcg

SEQ ID NO: 867 - DNA, 23 bp, synthetic construct
  source 1..23: mol_type = other DNA
caatcagctaatgacactgccta

SEQ ID NO: 868 - DNA, 22 bp, synthetic construct
  source 1..22: mol_type = other DNA
atggcagtggagttagtgattg

SEQ ID NO: 869 - DNA, 23 bp, synthetic construct
  source 1..23: mol_type = other DNA
gcaatcagctaactacactgcct

SEQ ID NO: 870 - DNA, 21 bp, synthetic construct
  source 1..21: mol_type = other DNA
aaagagaccggttcactgtgg

SEQ ID NO: 871 - DNA, 22 bp, synthetic construct
  source 1..22: mol_type = other DNA
atgctttttggggtaagggctt

SEQ ID NO: 872 - DNA, 22 bp, synthetic construct
  source 1..22: mol_type = other DNA
cgaccatggctgtagactgtta

SEQ ID NO: 873 - DNA, 313 bp, synthetic construct
  source 1..313: mol_type = other DNA
caatggcattcaccgcgtgccttagcgaaaagagaccggttcactgtggaatcgcaatcagctaactacactgcctctagctacgcgtattcttaagcaataaccgcaaagagaccggttcactgtggcctcgcaatcagctaactacactgcctcatactacgcgtattcttaagcaataatccaggcattcaccgcgtgccttagttcaaagagaccggttcactgtggacctctacgcgtattcttaagcaataattcaggcattcaccgcgtgccttacaacgcaatcagctaactacactgcctaggt

SEQ ID NO: 874 - DNA, 317 bp, synthetic construct
  source 1..317: mol_type = other DNA
agggattcctgggaaaactggactacccaatcagctaatgacactgcctaatagcgaccatggctgtagactgttaagatgcaatcagctaactacactgccttcagagggattcctgggaaaactggacctgagcaatcagctaactacactgcctagcccaatcagctaatgacactgcctagagacgaccatggctgtagactgttaaacacaatcagctaatgacactgcctattatagggattcctgggaaaactggacgtttcgaccatggctgtagactgttagaacgcaatcagctaactacactgcct

SEQ ID NO: 875 - protein, 266 aa, Homo sapiens [sequence omitted]

SEQ ID NO: 876 - protein, 269 aa, Mus musculus
MHVNGKVALVTGAAQGIGKAFAEALLLHGAKVALVDWNLEAGVKCKAALDEQFEPQKTLFVQCDVADQKQLRDTFRKVVDHFGRLDILVNNAGVNNEKNWEQTLQINLVSVISGTYLGLDYMSKQNGGEGGIIINMSSLAGLMPVAQQPVYCASKHGIIGFTRSAAMAANLMKSGVRLNVICPGFVDTPILESIEKEENMGQYIEYKDQIKAMMKFYGVLHPSTIANGLINLIEDDALNGAIMKITASKGIHFQDYDISPLLVKAPLTS

SEQ ID NO: 877 - protein, 482 aa, Homo sapiens
IDETRAHLLLKEKMMRLGGRLVLNTKEELANERLMTLKIAEMKEAMRTLIFPPSMHFFQAKHLIERSQVFNILRMMPKGAALHLHDIGIVTMDWLVRNVTYRPHCHICFTPRGIMQFRFAHPTPRPSEKCSKWILLEDYRKRVQNVTEFDDSLLRNFTLVTQHPEVIYTNQNVVWSKFETIFFTISGLIHYAPVFRDYVFRSMQEFYEDNVLYMEIRARLLPVYELSGEHHDEEWSVKTYQEVAQKFVETHPEFIGIKIIYSDHRSKDVAVIAESIRMAMGLRIKFPTVVAGFDLVGHEDTGHSLHDYKEALMIPAKDGVKLPYFFHAGETDWQGTSIDRNILDALMLNTTRIGHGFALSKHPAVRTYSWKKDIPIEVCPISNQVLKLVSDLRNHPVATLMATGHPMVISSDDPAMFGAKGLSYDFYEVFMGIGGMKADLRTLKQLAMNSIKYSTLLESEKNTFMEIWKKRWDKFIADVATK

SEQ ID NO: 878 - protein, 414 aa, Homo sapiens
FRGPLLPNRPFTTVWNANTQWCLERHGVDVDVSVFDVVANPGQTFRGPDMTIFYSSQLGTYPYYTPTGEPVFGGLPQNASLIAHLARTFQDILAAIPAPDFSGLAVIDWEAWRPRWAFNWDTKDIYRQRSRALVQAQHPDWPAPQVEAVAQDQFQGAARAWMAGTLQLGRALRPRGLWGFYGFPDCYNYDFLSPNYTGQCPSGIRAQNDQLGWLWGQSRALYPSIYMPAVLEGTGKSQMYVQHRVAEAFRVAVAAGDPNLPVLPYVQIFYDTTNHFLPLDELEHSLGESAAQGAAGVVLWVSWENTRTKESCQAIKEYMDTTLGPFILNVTSGALLCSQALCSGHGRCVRRTSHPKALLLLNPASFSIQLTPGGGPLSLRGALSLEDQAQMAVEFKCRCYPGWQAPWCERKSMW

SEQ ID NO: 879 - protein, 410 aa, Mus musculus
SVVSNRPFITVWNGDTHWCLTEYGVDVDVSVFDVVANKEQSFQGSNMTIFYREELGTYPYYTPTGEPVFGGLPQNASLVTHLAHTFQDIKAAMPEPDFSGLAVIDWEAWRPRWAFNWDSKDIYRQRSMELVQAEHPDWPETLVEAAAKNQFQEAAEAWMAGTLQLGQVLRPRGLWGYYGFPDCYNNDFLSLNYTGQCPVFVRDQNDQLGWLWNQSYALYPSIYLPAALMGTEKSQMYVRHRVQEALRVAIVSRDPHVPVMPYVQIFYEMTDYLLPLEELEHSLGESAAQGVAGAVLWLSSDKTSTKESCQAIKAYMDSTLGPFIVNVTSAALLCSEALCSGHGRCVRHPSYPEALLTLNPASFSIELTHDGRPPSLKGTLSLKDRAQMAMKFRCRCYRGWRGKWCDKRGM

SEQ ID NO: 880 - protein, 121 aa, Staphylococcus aureus
FTFEPFPTNEEIESNKKMLEKEKAYKESFKNSGLPTTLGKLDERLRNYLKKGTKNSAQFEKMVILTENKGYYTVYLNTPLAEDRKNVELLGKMYKTYFFKKGESKSSYVINGPGKTNEYAY

SEQ ID NO: 881 - protein, 111 aa, Homo sapiens
SDGGAQDCCLKYSQRKIPAKVVRSYRKQEPSLGCSIPAILFLPRKRSQAELCADPKELWVQQLMQHLDKTPSPQKPAQGCRKDRGASKTGKKGKGSKGCKRTERSQTPKGP

SEQ ID NO: 882 - protein, 110 aa, Mus musculus
SDGGGQDCCLKYSQKKIPYSIVRGYRKQEPSLGCPIPAILFSPRKHSKPELCANPEEGWVQNLMRRLDQPPAPGKQSPGCRKNRGTSKSGKKGKGSKGCKRTEQTQPSRG

SEQ ID NO: 883 - protein, 197 aa, Homo sapiens
RNLPVATPDPGMFPCLHHSQNLLRAVSNMLQKARQTLEFYPCTSEEIDHEDITKDKTSTVEACLPLELTKNESCLNSRETSFITNGSCLASRKTSFMMALCLSSIYEDLKMYQVEFKTMNAKLLMDPKRQIFLDQNMLAVIDELMQALNFNSETVPQKSSLEEPDFYKTKIKLCILLHAFRIRAVTIDRVMSYLNAS

SEQ ID NO: 884 - protein, 306 aa, Homo sapiens
IWELKKDVYVVELDWYPDAPGEMVVLTCDTPEEDGITWTLDQSSEVLGSGKTLTIQVKEFGDAGQYTCHKGGEVLSHSLLLLHKKEDGIWSTDILKDQKEPKNKTFLRCEAKNYSGRFTCWWLTTISTDLTFSVKSSRGSSDPQGVTCGAATLSAERVRGDNKEYEYSVECQEDSACPAAEESLPIEVMVDAVHKLKYENYTSSFFIRDIIKPDPPKNLQLKPLKNSRQVEVSWEYPDTWSTPHSYFSLTFCVQVQGKSKREKKDRVFTDKTSATVICRKNASISVRAQDRYYSSSWSEWASVPCS

SEQ ID NO: 885 - protein, 193 aa, Mus musculus
RVIPVSGPARCLSQSRNLLKTTDDMVKTAREKLKHYSCTAEDIDHEDITRDQTSTLKTCLPLELHKNESCLATRETSSTTRGSCLPPQKTSLMMTLCLGSIYEDLKMYQTEFQAINAALQNHNHQQIILDKGMLVAIDELMQSLNHNGETLRQKPPVGEADPYRVKMKLCILLHAFSTRVVTINRVMGYLSSA

SEQ ID NO: 886 - protein, 313 aa, Mus musculus
MWELEKDVYVVEVDWTPDAPGETVNLTCDTPEEDDITWTSDQRHGVIGSGKTLTITVKEFLDAGQYTCHKGGETLSHSHLLLHKKENGIWSTEILKNFKNKTFLKCEAPNYSGRFTCSWLVQRNMDLKFNIKSSSSSPDSRAVTCGMASLSAEKVTLDQRDYEKYSVSCQEDVTCPTAEETLPIELALEARQQNKYENYSTSFFIRDIIKPDPPKNLQMKPLKNSQVEVSWEYPDSWSTPHSYFSLKFFVRIQRKKEKMKETEEGCNQKGAFLVEKTSTEVQCKGGNVCVQAQDRYYNSSCSKWACVPCRVRS

SEQ ID NO: 887 - protein, 121 aa, synthetic construct
QVQLVESGGGLVEPGGSLRLSCAASGIIFKINDMGWYRQAPGKRREWVAASTGGDEAIYRDSVKDRFTISRDAKNSVFLQMNSLKPEDTAVYYCTAVISTDRDGTEWRRYWGQGTQVTVSS

SEQ ID NO: 888 - protein, 366 aa, synthetic construct
MELGLSWIFLLAILKGVQCQVQLVESGGGLVEPGGSLRLSCAASGIIFKINDMGWYRQAPGKRREWVAASTGGDEAIYRDSVKDRFTISRDAKNSVFLQMNSLKPEDTAVYYCTAVISTDRDGTEWRRYWGQGTQVTVSSPRDCGCKPCICTVPEVSSVFIFPPKPKDVLTITLTPKVTCVVVDISKDDPEVQFSWFVDDVEVHTAQTQPREEQFNSTFRSVSELPIMHQDWLNGKEFKCRVNSAAFPAPIEKTISKTKGRPKAPQVYTIPPPKEQMAKDKVSLTCMITDFFPEDITVEWQWNGQPAENYKNTQPIMDTDGSYFVYSKLNVQKSNWEAGNTFTCSVLHEGLHNHHTEKSLSHSPGK

SEQ ID NO: 889 - protein, 243 aa, synthetic construct
QVQLVQSGAEVKKPGSSVKVSCKASGYTFSSNVISWVRQAPGQGLEWMGGVIPIVDIANYAQRFKGRVTITADESTSTTYMELSSLRSEDTAVYYCASTLGLVLDAMDYWGQGTLVTVSSGGGGSGGGGSGGGGSETVLTQSPGTLSLSPGERATLSCRASQSLGSSYLAWYQQKPGQAPRLLIYGASSRAPGIPDRFSGSGSGTDFTLTISRLEPEDFAVYYCQQYADSPITFGQGTRLEIK

SEQ ID NO: 890 - protein, 491 aa, synthetic construct
MDMRVPAQLLGLLLLWLRGARCQVQLVQSGAEVKKPGSSVKVSCKASGYTFSSNVISWVRQAPGQGLEWMGGVIPIVDIANYAQRFKGRVTITADESTSTTYMELSSLRSEDTAVYYCASTLGLVLDAMDYWGQGTLVTVSSGGGGSGGGGSGGGGSETVLTQSPGTLSLSPGERATLSCRASQSLGSSYLAWYQQKPGQAPRLLIYGASSRAPGIPDRFSGSGSGTDFTLTISRLEPEDFAVYYCQQYADSPITFGQGTRLEIKPRDCGCKPCICTVPEVSSVFIFPPKPKDVLTITLTPKVTCVVVDISKDDPEVQFSWFVDDVEVHTAQTQPREEQFNSTFRSVSELPIMHQDWLNGKEFKCRVNSAAFPAPIEKTISKTKGRPKAPQVYTIPPPKEQMAKDKVSLTCMITDFFPEDITVEWQWNGQPAENYKNTQPIMDTDGSYFVYSKLNVQKSNWEAGNTFTCSVLHEGLHNHHTEKSLSHSPGK

SEQ ID NO: 891 - protein, 114 aa, synthetic construct
QVQLVESGGGVVQPGGSLRLSCAASDSIDSLVNMGWYRQAPGKQRELVALIATYITHYADFVKGRFTISRDNSKNTLYLQMNSLRAEDTAVYYCYARNIIVDYWGQGTLVTVSS

SEQ ID NO: 892 - protein, 365 aa, synthetic construct
MELGLSWIFLLAILKGVQCQVQLVESGGGVVQPGGSLRLSCAASDSIDSLVNMGWYRQAPGKQRELVALIATYITHYADFVKGRFTISRDNSKNTLYLQMNSLRAEDTAVYYCYARNIIVDYWGQGTLVTVSSAAAESKYGPPCPPCPAPEFLGGPSVFLFPPKPKDTLMISRTPEVTCVVVDVSQEDPEVQFNWYVDGVEVHNAKTKPREEQFNSTYRVVSVLTVLHQDWLNGKEYKCKVSNKGLPSSIEKTISKAKGQPREPQVYTLPPSQEEMTKNQVSLTCLVKGFYPSDIAVEWESNGQPENNYKTTPPVLDSDGSFFLYSRLTVDKSRWQEGNVFSCSVMHEALHNHYTQKSLSLSPGK

SEQ ID NO: 893 - protein, 120 aa, synthetic construct
QVQLQQSGPELVRPGVSVKISCKGSGYTFTDYAMHWVKQSHAKSLEWIGVISTYSSNTNYNQKFKGKATMTVDKSSSTAYMELARLTSEDSAIYYCARDDGHYVYAMDYWGQGTSVTVSS

SEQ ID NO: 894 - protein, 111 aa, synthetic construct
DVVLTQTPLSLPVNIGDQASISCKSTKSLLNSDGFTYLDWYLQKPGQSPQLLIYLVSNRFSGVPDRFSGSGSGTDFTLKISRVEAEDLGVYYCFQSNYLYTFGGGTKLEIK

SEQ ID NO: 895 - protein, 8 aa, synthetic construct
GIIFKIND

SEQ ID NO: 896 - protein, 7 aa, synthetic construct
STGGDEA

SEQ ID NO: 897 - protein, 12 aa, synthetic construct
TAVISTDRDGTE

SEQ ID NO: 898 - protein, 8 aa, synthetic construct
GYTFSSNV

SEQ ID NO: 899 - protein, 12 aa, synthetic construct
MGGVIPIVDIAN

SEQ ID NO: 900 - protein, 13 aa, synthetic construct
ASTLGLVLDAMDY

SEQ ID NO: 901 - protein, 9 aa, synthetic construct
QSLGSSYLA

SEQ ID NO: 902 - protein, 7 aa, synthetic construct
GASSRAP

SEQ ID NO: 903 - protein, 9 aa, synthetic construct
QQYADSPIT

SEQ ID NO: 904 - protein, 8 aa, synthetic construct
DSIDSLVN

SEQ ID NO: 905 - protein, 8 aa, synthetic construct
IATYITHY

SEQ ID NO: 906 - protein, 9 aa, synthetic construct
YARNIIVDY

SEQ ID NO: 907 - protein, 8 aa, synthetic construct
GYTFTDYA

SEQ ID NO: 908 - protein, 8 aa, synthetic construct
ISTYSSNT

SEQ ID NO: 909 - protein, 13 aa, synthetic construct
ARDDGHYVYAMDY

SEQ ID NO: 910 - protein, 11 aa, synthetic construct
KSLLNSDGFTY

SEQ ID NO: 911 - skipped

SEQ ID NO: 912 - protein, 8 aa, synthetic construct
FQSNYLYT

SEQ ID NO: 913 - protein, 36 aa, synthetic construct
MCMPCFTTDHQMARKCDDCCGGKGRGKCYGPQCLCR

SEQ ID NO: 914 - protein, 243 aa, synthetic construct
DVQLVQSGAEVKKPGASVKVSCKASGYTFTRYTMHWVRQAPGQGLEWIGYINPSRGYTNYADSVKGRFTITTDKSTSTAYMELSSLRSEDTATYYCARYYDDHYCLDYWGQGTTVTVSSGEGTSTGSGGSGGSGGADDIVLTQSPATLSLSPGERATLSCRASQSVSYMNWYQQKPGKAPKRWIYDTSKVASGVPARFSGSGSGTDYSLTINSLEAEDAATYYCQQWSSNPLTFGGGTKVEIK

SEQ ID NO: 915 - protein, 294 aa, synthetic construct
MCMPCFTTDHQMARKCDDCCGGKGRGKCYGPQCLCRGGGGSGGGGSGGGGSDVQLVQSGAEVKKPGASVKVSCKASGYTFTRYTMHWVRQAPGQGLEWIGYINPSRGYTNYADSVKGRFTITTDKSTSTAYMELSSLRSEDTATYYCARYYDDHYCLDYWGQGTTVTVSSGEGTSTGSGGSGGSGGADDIVLTQSPATLSLSPGERATLSCRASQSVSYMNWYQQKPGKAPKRWIYDTSKVASGVPARFSGSGSGTDYSLTINSLEAEDAATYYCQQWSSNPLTFGGGTKVEIK

SEQ ID NO: 916 - protein, 294 aa, synthetic construct
DVQLVQSGAEVKKPGASVKVSCKASGYTFTRYTMHWVRQAPGQGLEWIGYINPSRGYTNYADSVKGRFTITTDKSTSTAYMELSSLRSEDTATYYCARYYDDHYCLDYWGQGTTVTVSSGEGTSTGSGGSGGSGGADDIVLTQSPATLSLSPGERATLSCRASQSVSYMNWYQQKPGKAPKRWIYDTSKVASGVPARFSGSGSGTDYSLTINSLEAEDAATYYCQQWSSNPLTFGGGTKVEIKGGGGSGGGGSGGGGSMCMPCFTTDHQMARKCDDCCGGKGRGKCYGPQCLCR

SEQ ID NO: 917 - protein, 1235 aa, Herpes simplex virus 1
MFSGGGGPLSPGGKSAARAASGFFAPAGPRGAGRGPPPCLRQNFYNPYLAPVGTQQKPTGPTQRHTYYSECDEFRFIAPRVLDEDAPPEKRAGVHDGHLKRAPKVYCGGDERDVLRVGSGGFWPRRSRLWGGVDHAPAGFNPTVTVFHVYDILENVEHAYGMRAAQFHARFMDAITPTGTVITLLGLTPEGHRVAVHVYGTRQYFYMNKEEVDRHLQCRAPRDLCERMAAALRESPGASFRGISADHFEAEVVERTDVYYYETRPALFYRVYVRSGRVLSYLCDNFCPAIKKYEGGVDATTRFILDNPGFVTFGWYRLKPGRNNTLAQPRAPMAFGTSSDVEFNCTADNLAIEGGMSDLPAYKLMCFDIECKAGGEDELAFPVAGHPEDLVIQISCLLYDLSTTALEHVLLFSLGSCDLPESHLNELAARGLPTPVVLEFDSEFEMLLAFMTLVKQYGPEFVTGYNIINFDWPFLLAKLTDIYKVPLDGYGRMNGRGVFRVWDIGQSHFQKRSKIKVNGMVNIDMYGIITDKIKLSSYKLNAVAEAVLKDKKKDLSYRDIPAYYAAGPAQRGVIGEYCIQDSLLVGQLFFKFLPHLELSAVARLAGINITRTIYDGQQIRVFTCLLRLADQKGFILPDIQGRFRGAGGEAPKRPAAAREDEERPEEEGEDEDEREEGGGEREPEGARETAGRHVGYQGARVLDPISGFHVNPVVVFDFASLYPSIIQAHNLCFSTLSLRADAVAHLEAGKDYLEIEVGGRRLFFVKAHVRESLLSILLRDWLAMRKQIRSRIPQSSPEEAVLLDKQQAAIKVVCNSVYGFTGVQHGLLPCLHVAATVTTIGREMLLATREYVHARWAAFEQLLADFPEAADMRAPGPYSMRIIYGDTDSIFVLCRGLTAAGLTAMGDKMASHISRALFLPPIKLECEKTFTKLLLIAKKKYIGVIYGGKMLIKGVDLVRKNNCAFINRTSRALVDLLFYDDTVSGAAAALAERPAEEWLARPLPEGLQAFGAVLVDAHRRITDPERDIQDFVLTAELSRHPRAYTNKRLAHLTVYYKLMARRAQVPSIKDRIPYVIVAQTREVEETVARLAALRELDAAAPGDEPAPPAALPSPAKRPRETPSPADPPGGASKPRKLLVSELAEDPAYAIAHGVALNTDYYFSHLLGAACVTFKALFGNNAKITESLLKRFIPEVWHPPDDVTARLRAAGFGAVGAGATAEETRRMLHRAFDTLA

SEQ ID NO: 918 - protein, 376 aa, Herpes simplex virus 1
MASYPCHQHASAFDQAARSRGHSNRRTALRPRRQQEATEVRPEQKMPTLLRVYIDGPHGMGKTTTTQLLVALGSRDDIVYVPEPMTYWRVLGASETIANIYTTQHRLDQGEISAGDAAVVMTSAQITMGMPYAVTDAVLAPHIGGEAGSSHAPPPALTLIFDRHPIAALLCYPAARYLMGSMTPQAVLAFVALIPPTLPGTNIVLGALPEDRHIDRLAKRQRPGERLDLAMLAAIRRVYGLLANTVRYLQCGGSWREDWGQLSGTALTPQGAEPQSNAGPRPHIGETLFTLFRAPELLAPNGDLYNVFAWALDVLAKRLRPMHVFILDYDQSPAGCRDALLQLTSGMVQTHVTTPGSIPTICDLARTFAREMGEAH

SEQ ID NO: 919 - protein, 904 aa, Herpes simplex virus 1
MRQGAPARGRRWFVVWALLGLTLGVLVASAAPSSPGAPGVAAATPAANGGPATPAPPALGAAPTVDPKPKKNKKPKNPTPPRPAGDNATVAAGHATLREHLRDIKAENTDANFYVCPPPTGATVVQFEQPRRCPTRPEGQNYTEGIAVVFKENIAPYKFKATMYYKDVTVSQVWFGHRYSQFMGIFEDRAPVPFEEVIDKINAKGVCRSTAKYVRNNLETTAFHRDDHETDMELKPANAATRTSRGWHTTDLKYNPSRVEAFHRYGTTVNCIVEEVDARSVYPYDEFVLATGDFVYMSPFYGYREGSHTEHTSYAADRFKQVDGFYARDLTTKARATAPTTRNLLTTPKFTVAWDWVPKRPSVCTMTKWQEVDEMLRSEYGGSFRFSSDAISTTFTTNLTEYPLSRVDLGDCIGKDARDAMDRIFARRYNATHIKVGQPQYYLANGGFLIAYQPLLSNTLAELYVREHLREQNRKPPNPTPPPPGASANASVERIKTTSSIEFARLQFTYNHIQRHVNDMLGRVAIAWCELQNHELTLWNEARKLNPNAIASATVGRRVSARMLGDVMAVSTCVPVAADNVIVQNSMRISSRPGACYSRPLVSFRYEDQGPLVEGQLGENNELRLTRDAIEPCTVGHRRYFTFGGGYVYFEEYAYSHQLSRADITTVSTFIDLNITMLEDHEFVPLEVYTRHEIKDSGLLDYTEVQRRNQLHDLRFADIDTVIHADANAAMFAGLGAFFEGMGDLGRAVGKVVMGIVGGVVSAVSGVSSFMSNPFGALAVGLLVLAGLAAAFFAFRYVMRLQSNPMKALYPLTTKELKNPTNPDASGEGEEGGDFDEAKLAEAREMIRYMALVSAMERTEHKAKKKGTSALLSAKVTDMVMRKRRNTNYTQVPNKDGDADEDDL

SEQ ID NO: 920 - protein, 338 aa, Herpes simplex virus 1
MLAVRSLQHLSTVVLITAYGLVLVWYTVFGASPLHRCIYAVRPTGTNNDTALVWMKMNQTLLFLGAPTHPPNGGWRNHAHICYANLIAGRVVPFQVPPDAMNRRIMNVHEAVNCLETLWYTRVRLVVVGWFLYLAFVALHQRRCMFGVVSPAHKMVAPATYLLNYAGRIVSSVFLQYPYTKITRLLCELSVQRQNLVQLFETDPVTFLYHRPAIGVIVGCELMLRFVAVGLIVGTAFISRGACAITYPLFLTITTWCFVSTIGLTELYCILRRGPAPKNADKAAAPGRSKGLSGVCGRCCSIILSGIAVRLCYIAVVAGVVLVALHYEQEIQRRLFDV

SEQ ID NO: 921 - protein, 369 aa, Herpes simplex virus 1
KHALADASLKMADPNRFRGKDHPVLDQLTDPPGVRRVYHIQAGLPDPFQPPSLPITVYYAVLERACRSVLLNAPSEAPQIVRGASEDVRKQPYNLTIAWFRMGGNCAIPITVMEYTECSYNKSLGACPIRTQPRWNYYDSFSAVSEDNLGFLMHAPAFETAGTYLRLVKINDWTEITQFILEHRAKGSCKYALPLRIPPSACLSPQAYQQGVTVDSIGMLPRFIPENQRTVAVYSLKIAGWHGPKAPYTSTLLPPELSETPNATQPELAPEDPEDSALLEDPVGTVAPQIPPNWHIPSIQDAATPYHPPATPNNMGLIAGAVGGSLLAALVICGIVYWMRRRTQKAPKRIRLPHIREDDQPSSHQPLFY

SEQ ID NO: 922 - protein, 33 aa, synthetic construct
GCPRPRGDNPPLTCSQDSDCLAGCVCGPNGFCG

SEQ ID NO: 923 - protein, 129 aa, synthetic construct
EVQLVESGGGLVQAGGSLRLSCAASGRTFSSYVMGWFRQATGKEREFVATIAWDSGSTYYADSVKGRFTISRDNAKNTVHLQMNSLKPEDTAVYYCAASYNVYYNNYYYPISRDEYDYWGQGTQVTVSS

SEQ ID NO: 924 - DNA, 23 bp, synthetic construct
  source 1..23: mol_type = other DNA
aggcagtgtagttagctgattgc

SEQ ID NO: 925 - DNA, 22 bp, synthetic construct
  source 1..22: mol_type = other DNA
tggtttaccgtcccacatacat

SEQ ID NO: 926 - DNA, 23 bp, synthetic construct
  source 1..23: mol_type = other DNA
ttacagttgttcaaccagttact

SEQ ID NO: 927 - DNA, 23 bp, synthetic construct
  source 1..23: mol_type = other DNA
gcaatcagctaactacactgcct

SEQ ID NO: 928 - DNA, 22 bp, synthetic construct
  source 1..22: mol_type = other DNA
atgtatgtgggacggtaaacca

SEQ ID NO: 929 - DNA, 23 bp, synthetic construct
  source 1..23: mol_type = other DNA
agtaactggttgaacaactgtaa

SEQ ID NO: 930 - DNA, 324 bp, synthetic construct
  source 1..324: mol_type = other DNA
gtcaatgtatgtgggacggtaaaccatacagcaatcagctaactacactgcctgacaagtaactggttgaacaactgtaaacttgcaatcagctaactacactgcctgtaaatgtatgtgggacggtaaaccaattcagtaactggttgaacaactgtaagcaaatgtatgtgggacggtaaaccattttagtaactggttgaacaactgtaagtccgcaatcagctaactacactgccttatgatgtatgtgggacggtaaaccatcggagtaactggttgaacaactgtaagtccgcaatcagctaactacactgccttcat

SEQ ID NO: 931 - DNA, 2775 bp, synthetic construct
  source 1..2775: mol_type = other DNA
atgtgcccgcagaagctcaccatctcctggttcgccatcgtgctgctggtgtcgcccctgatggccatgtgggagctcgagaaggacgtctacgtcgtggaggtggactggacccccgacgcgcccggggaaaccgtgaacctgacgtgcgacacccccgaggaggacgacatcacctggacctcggaccagcggcacggcgtcatcgggagcggcaagaccctgaccatcaccgtgaaggagttcctcgacgccgggcagtacacgtgccacaagggcggggaaaccctgtcgcactcccatctgctgctgcacaagaaggagaacggcatctggtcgaccgagatcctgaagaacttcaagaacaagaccttcctgaagtgcgaggccccgaactacagcgggcggttcacgtgctcctggctggtgcagcgcaacatggacctgaagttcaacatcaagagctccagctcctcccccgactcccgcgccgtgacttgcggcatggccagcctcagcgccgagaaggtcaccctggaccagcgcgactacgagaagtactcggtgtcctgccaggaggacgtgacgtgcccgaccgccgaggaaaccctgcccatcgagctcgccctggaggcccggcagcagaacaagtacgagaactactccacctcgttcttcatccgcgacatcatcaagcccgacccccccaagaacctccagatgaagccgctgaagaactcccaggtcgaggtgtcctgggagtaccccgactcctggtcgaccccgcactcctacttctcgctgaagttcttcgtgcggatccagcggaagaaggagaagatgaaggagactgaggagggctgcaaccagaagggggccttcctggtggaaaagacctccaccgaggtgcagtgcaaggggggcaacgtctgcgtgcaggcccaggaccgctactacaactcgtcctgctccaagtgggcctgcgtgccctgccgggtccgctccggcggcgggggctccggcgggggcggctccgggggcgggggcagccgggtcatccccgtgtcggggccggcgcgctgcctgtcccagtcccggaacctcctcaagaccaccgacgacatggtcaagaccgcccgcgagaagctgaagcactacagctgcaccgcggaggacatcgaccacgaggacatcacccgcgaccagacctcgaccctcaagacgtgcctgccgctcgagctccacaagaacgagtcgtgcctggccacccgggaaacctccagcaccacccggggcagctgcctgccgccgcaaaagaccagcctgatgatgacgctgtgcctgggctccatctacgaggacctgaagatgtaccagaccgagttccaggccatcaacgccgcgctgcagaaccacaaccatcagcagatcatcctggacaaggggatgctggtcgccatcgacgagctcatgcagtccctgaaccacaacggcgaaaccctgcgccagaagccccccgtcggggaggcggacccgtaccgggtcaagatgaagctctgcatcctcctccacgccttctccacccgggtggtcaccatcaaccgcgtgatggggtacctgagcagcgcccggcgcaagcgggagggccgcggctccctcctgacctgtggcgacgtggaggagaacccgggccccatggagctcggcctgagctggatcttcctcctggccatcctgaagggcgtgcagtgccaggtgcagctcgtggagtcgggcggcggcgtggtccagccgggcggctcgctgcggctgtcctgcgccgcctccgacagcatcgactccctggtgaacatgggctggtaccgccaggccccggggaagcagcgggagctcgtcgcgctgatcgccacctacatcacccactacgccgacttcgtgaagggccggttcaccatctcccgggacaactcgaagaacaccctgtacctccagatgaactcgctgcgggcggaggacaccgccgtgtactactgctacgcgcggaacatcatcgtggactactggggccagggcaccctggtcaccgtgtccagcccccgcgactgcgggtgcaagccgtgcatctgcaccgtccccgaagtctcctccgtgttcatcttcccgccgaagccgaaggacgtgctcaccatcaccctgaccccgaaggtcacgtgcgtggtggtggacatctccaaggacgacccggaggtgcagttcagctggttcgtggacgacgtggaggtgcacaccgcgcagacccagccccgggaggagcagttcaactccacgttccggtccgtgtcggagctgccgatcatgcaccaggactggctgaacgggaaggagttcaagtgccgggtcaactccgccgccttccccgcgcccatcgaaaagaccatcagcaagaccaagggccggcccaaggccccgcaagtgtacaccatcccgcccccgaaggagcagatggccaaggacaaggtgtcgctgacgtgcatgatcaccgacttcttccccgaggacatcaccgtcgagtggcagtggaacgggcagccggcggagaactacaagaacacccagccgatcatggacaccgacggctcctacttcgtgtactccaagctcaacgtgcagaagtcgaactgggaggccggcaacacgttcacctgttccgtcctccacgagggcctgcacaaccaccacaccgagaagtccctgtcccactcccccgggaaatga

SEQ ID NO: 932 - DNA, 2775 bp, synthetic construct
  source 1..2775: mol_type = other DNA
atgtgcccccagaagctcaccatcagctggttcgccatcgtcctgctcgtcagccccctcatggcgatgtgggagctggagaaggacgtctacgtcgttgaggtcgactggaccccggacgcgccgggggaaaccgtcaacctcacgtgcgacacgcccgaggaggacgacatcacctggacctccgaccagcgccacggcgtgatcggctcgggcaagaccctgacgatcacggtgaaggagttcctggacgcgggccagtacacgtgccacaagggcggcgagactctctctcactcgcacctcctgctccacaagaaggagaacggcatctggagcaccgagatcctcaagaacttcaagaataagaccttcctgaagtgcgaggcgccgaactactccggccggttcacgtgctcctggctggtccagcgcaacatggatctcaagttcaacatcaagtcgtcgtcctcgtcgccggacagccgggccgtcacgtgcgggatggcctccctgtcggccgagaaggtcacgctcgaccagcgggactacgagaagtacagcgtgtcgtgccaggaggacgtcacgtgcccgacggccgaggaaaccctcccgatcgagctggcccttgaggcgcgccagcagaacaagtacgagaactactcgacctcgttcttcatccgcgacatcatcaagcccgatcccccgaagaacctccagatgaagccgctgaagaactcccaggtcgaggtgagctgggagtacccggattcctggtcgacgccgcacagctacttctccctgaagttcttcgtgaggatccagcggaaaaaagagaagatgaaggagacagaggagggctgcaaccagaagggcgcgttcctggtggaaaagaccagcaccgaggtccagtgcaagggcgggaacgtgtgcgtgcaggcgcaggaccggtactataactcaagctgctccaagtgggcctgcgtgccgtgccgcgtgcggtcgggtggcggcggctcgggcggcggcggcagcgggggcggcgggtcccgcgtgatccccgtgtccgggcccgcgcgctgcctgtcccagagccgtaacctcctcaagacgaccgacgacatggtcaagaccgcgcgggagaagctcaagcactactcgtgcaccgccgaggatatcgaccacgaggacatcacgcgcgaccagacgagcaccctcaagacgtgcctgccgctggagctgcacaagaacgagtcgtgcctcgcgacccgggaaaccagctcgacgacccgcggctcgtgcctgcccccgcaaaagacctcgctcatgatgaccctgtgcctggggtcgatctacgaggacttgaagatgtaccagaccgagttccaggccatcaacgccgccctccagaaccacaaccatcagcagatcatcctcgacaagggcatgctggtcgcgatcgacgagctgatgcagagcctgaaccacaacggcgaaaccctccgccagaagccgccggtgggagaggccgacccctaccgcgtgaagatgaagctgtgcatcctcctgcacgcgttctcgacccgcgtggtcacgatcaaccgcgtgatgggctacctgtcgtcggcgcggcgcaagcgcgaggggcgcggctcgctgctgacgtgcggcgacgtcgaagagaacccgggcccgatggagctcggcctcagctggatcttcctgctcgcgatcctcaagggcgtgcagtgccaggtccagctcgtggagtcgggcgggggcgtggtgcagcccggcgggtcgctccggctctcgtgcgccgcgtcggactccatcgactcgctggtgaacatgggctggtaccgccaggcgccggggaagcagcgagagctcgtggcgctcatcgcgacgtacatcacccactacgccgacttcgtgaagggccgcttcaccatctcccgcgacaactcgaagaacacgctctacctccagatgaacagcctccgggcagaggacaccgcggtctactactgctacgcgcggaacatcatcgtggactactgggggcagggcaccctggtgacggtgtcctcccctcgggactgcgggtgcaagccgtgtatctgcaccgtgcccgaggtgtcctccgtgttcatcttcccgccgaagccgaaggacgtgctgaccatcacgctcacccccaaggtcacgtgcgtggtcgtggatatcagcaaggacgaccccgaggtgcagttctcctggttcgtggacgacgtcgaggtgcacaccgcccagacgcagccgcgcgaggagcaattcaacagcaccttccgctcggtgtccgagctgccgatcatgcaccaggactggctcaacggcaaggagttcaagtgccgcgtgaacagtgcggcgttcccggcgccgatcgaaaagaccatcagcaagaccaagggccgcccgaaggctccccaggtgtacacgatcccgccgccgaaggagcagatggccaaggacaaggtcagcctcacgtgcatgatcacggacttcttccccgaggacatcaccgtggagtggcagtggaacggccagccggcggagaactacaagaacacccagcccatcatggacaccgacggcagctacttcgtgtactccaagctgaacgtgcagaagtcgaactgggaggccggcaacaccttcacgtgctcggtcctgcacgagggcctgcacaaccaccacaccgagaagtccctctcccactcgccgggcaagtga

SEQ ID NO: 933 - DNA, 2775 bp, synthetic construct
  source 1..2775: mol_type = other DNA
atgtgcccgcagaagctgaccatctcctggttcgccatcgtgctgctggtgtcgcctctgatggcgatgtgggagctggaaaaggacgtgtacgtggtggaagtggactggacccccgacgcccctggagagactgtgaacctgacctgtgatacccctgaggaggacgacattacctggacctcggaccagcggcacggcgtgatcggaagcggaaagaccctcaccatcaccgtgaaggagttcctggatgccggccagtacacttgccacaagggcggagaaaccctgtcccacagccatctactgctgcacaagaaggaaaacggcatctggtcaactgagatcctgaagaatttcaagaacaagaccttcctgaagtgcgaagccccgaattactccggccgcttcacctgttcgtggctggtgcagcgcaacatggacctgaagttcaacattaagtcctcctcctcctcccccgactcccgcgccgtgacctgtggcatggcctccctgtcggccgagaaagtgaccctggatcagcgggattacgagaagtactcagtgtcctgccaggaggacgtcacctgtccaaccgccgaagaaactctgcccatcgagctcgccttggaagcccgccagcaaaacaagtacgagaactactcgacctccttcttcatccgggacatcatcaagcccgacccccccaagaacctccagatgaagcccctgaagaactcccaagtggaagtgtcgtgggagtacccagactcgtggagcactccccactcctacttctccctgaagttcttcgttcggatccagcggaagaaggagaagatgaaggaaactgaggagggctgcaaccaaaagggcgccttcctggtggaaaagacatcgactgaggtgcagtgcaagggcggcaacgtgtgcgtgcaggcccaggatcgctactacaactcttcctgctccaagtgggcgtgcgtgccgtgccgggtccgcagcggcggcgggggttcggggggaggcggctccggcggcggcgggtcccgcgtgatcccggtgtcgggccccgcccgctgcctctcccaaagccgcaacctcttgaaaactaccgacgacatggtcaaaaccgcgcgcgagaagctgaagcactacagctgcaccgccgaggacatcgaccacgaggacatcactcgggaccagacctccaccctcaagacgtgcctgccgcttgaactgcacaagaacgagtcctgcctggccaccagggaaacctcgtccaccacgcggggcagctgcctcccgccgcaaaagactagcctcatgatgaccctctgcctgggctccatctacgaggacctcaagatgtaccagactgagttccaggccatcaacgctgccttgcaaaaccacaatcaccagcagatcatcctggataagggcatgctcgtggccatcgacgagctgatgcagtccttgaaccacaacggcgaaaccctgcgccaaaagccgcccgtgggcgaagcggacccgtaccgcgtgaagatgaagctatgcatcctcctgcacgcattcagcacccgggtggtgaccattaaccgcgtgatgggctacctgtcctccgcccgccgcaagcgggaaggccgtgggtccctgctcacctgtggggatgtggaggaaaatcctggccccatggaactggggctgtcctggatcttcctcctcgccattctgaagggagtccagtgtcaggtgcagctggtcgaatccggtggcggcgtggtccagcccggaggatcgctgcggctgtcctgtgccgcctccgactccatcgactccctggtgaacatgggatggtaccgccaagcacccgggaagcagagggaactggtcgcgctgattgcgacctacatcactcactacgccgatttcgtgaagggccggtttaccatttcccgcgacaactcgaagaacaccctgtaccttcagatgaactcgcttcgcgccgaggacaccgccgtgtactactgctacgcgcgaaacatcatcgtggactactggggccaggggaccctggtcaccgtgtcaagcccgcgggactgcggatgcaagccgtgcatctgcacggtgcctgaggtgtcctccgtgttcatcttcccgccaaagccgaaggacgtcctgaccatcactcttaccccgaaagtcacttgcgtggtggtggacatctcgaaggacgacccggaggtgcagttcagctggttcgtcgacgacgtggaggtgcacaccgcccagacccagccgcgggaggaacagttcaacagcacgtttcgctcggtgtccgagctgcccatcatgcaccaggactggctgaacgggaaggagttcaagtgccgggtcaactccgccgccttccccgcccccatcgaaaagaccatcagcaagaccaagggtcgccccaaggctccccaggtgtacaccatcccgccgcctaaggagcagatggccaaggacaaggtgtccctgacttgcatgatcacggatttcttcccggaggatatcactgtcgagtggcagtggaacggccagcccgccgaaaactacaagaatacgcagcctatcatggacaccgatggcagctacttcgtgtacagcaagctgaacgtccagaaatcgaactgggaggccggaaacaccttcacctgttcggtgctgcacgaaggactgcacaaccatcacacggagaagtcgctgagccactcgcccggcaaataa

SEQ ID NO: 934 - DNA, 2775 bp, synthetic construct
  source 1..2775: mol_type = other DNA
atgtgtcctcagaagctaaccatctcctggtttgccatcgttttgctggtgtctccactcatggccatgtgggagctggagaaagacgtttatgttgtagaggtggactggactcccgatgcccctggagaaacagtgaacctcacctgtgacacgcctgaagaagatgacatcacctggacctcagaccagagacatggagtcataggctctggaaagaccctgaccatcactgtcaaagagtttctagatgctggccagtacacctgccacaaaggaggcgagactctgagccactcacatctgctgctccacaagaaggaaaatggaatttggtccactgaaattttaaaaaatttcaaaaacaagactttcctgaagtgtgaagcaccaaattactccggacggttcacgtgctcatggctggtgcaaagaaacatggacttgaagttcaacatcaagagcagtagcagttcccctgactctcgggcagtgacatgtggaatggcgtctctgtctgcagagaaggtcacactggaccaaagggactatgagaagtattcagtgtcctgccaggaggatgtcacctgcccaactgccgaggagaccctgcccattgaactggcgttggaagcacggcagcagaataaatatgagaactacagcaccagcttcttcatcagggacatcatcaaaccagacccgcccaagaacttgcagatgaagcctttgaagaactcacaggtggaggtcagctgggagtaccctgactcctggagcactccccattcctacttctccctcaagttctttgttcgaatccagcgcaagaaagaaaagatgaaggagacagaggaggggtgtaaccagaaaggtgcgttcctcgtagagaagacatctaccgaagtccaatgcaaaggcgggaatgtctgcgtgcaagctcaggatcgctattacaattcctcgtgcagcaagtgggcatgtgttccctgcagggtccgatccggaggtggcggttctggcggtggagggagcggaggcggaggatcaagggtcattccagtctctggacctgccaggtgtcttagccagtcccgaaacctgctgaagaccacagatgacatggtgaagacggccagagaaaaactgaaacattattcctgcactgctgaagacatcgatcatgaagacatcacacgggaccaaaccagcacattgaagacctgtttaccactggaactacacaagaacgagagttgcctggctactagagagacttcttccacaacaagagggagctgcctgcccccacagaagacgtctttgatgatgaccctgtgccttggtagcatctatgaggacttgaagatgtaccagacagagttccaggccatcaacgcagcacttcagaatcacaaccatcagcagatcattctagacaagggcatgctggtggccatcgatgagctgatgcagtctctgaatcataatggcgagactctgcgccagaaacctcctgtgggagaagcagacccttacagagtgaaaatgaagctctgcatcctgcttcacgccttcagcacccgcgtcgtgaccatcaacagggtgatgggctatctgagctccgccaggaggaagagagaaggcagggggagccttctcacttgcggcgatgtcgaggaaaatccggggcctatggagctggggttgagctggatctttctcctggctattctcaaaggggtgcagtgccaagttcagctggtggaaagcggaggcggagtggtgcagcccggtggatctttaaggctgagctgtgccgccagcgacagcatcgactctttagtgaacatgggctggtacagacaagctcccggcaagcagagagagctggtggctttaatcgccacctacatcacccactacgccgactttgtgaagggtcgtttcaccatctctcgtgacaacagcaagaacactttatacctccagatgaactctttaagggccgaggacaccgccgtgtactactgctacgctcgtaacatcatcgtggactactggggacaaggtactttagtgaccgtgagcagccccagggattgtggttgtaagccttgcatatgtacagtcccagaagtatcatctgtcttcatcttccccccaaagcccaaggatgtgctcaccattactctgactcctaaggtcacgtgtgttgtggtagacatcagcaaggatgatcccgaggtccagttcagctggtttgtagatgatgtggaggtgcacacagctcagacgcaaccccgggaggagcagttcaacagcactttccgctcagtcagtgaacttcccatcatgcaccaggactggctcaatggcaaggagttcaaatgcagggtcaacagtgcagctttccctgcccccatcgagaaaaccatctccaaaaccaaaggcagaccgaaggctccgcaggtgtacaccattccacctcccaaggagcagatggccaaggataaagtcagtctgacctgcatgataacagacttcttccctgaagacattactgtggagtggcagtggaatgggcagccagcggagaactacaagaacactcagcccatcatggacacagatggctcttacttcgtctacagcaagctcaatgtgcagaagagcaactgggaggcaggaaatactttcacctgctctgtgttacatgagggcctgcacaaccaccatactgagaagagcctctcccactctcctggtaaatag

SEQ ID NO: 935 - DNA, 2925 bp, synthetic construct
  source 1..2925: mol_type = other DNA
atggtcagcgttccaacagcctcaccctcggcatccagcagctcctctcagtgccggtccagcatgtgtcaatcacgctacctcctctttttggccacccttgccctcctaaaccacctcagtttggccagggtcattccagtctctggacctgccaggtgtcttagccagtcccgaaacctgctgaagaccacagatgacatggtgaagacggccagagaaaaactgaaacattattcctgcactgctgaagacatcgatcatgaagacatcacacgggaccaaaccagcacattgaagacctgtttaccactggaactacacaagaacgagagttgcctggctactagagagacttcttccacaacaagagggagctgcctgcccccacagaagacgtctttgatgatgaccctgtgccttggtagcatctatgaggacttgaagatgtaccagacagagttccaggccatcaacgcagcacttcagaatcacaaccatcagcagatcattctagacaagggcatgctggtggccatcgatgagctgatgcagtctctgaatcataatggcgagactctgcgccagaaacctcctgtgggagaagcagacccttacagagtgaaaatgaagctctgcatcctgcttcacgccttcagcacccgcgtcgtgaccatcaacagggtgatgggctatctgagctccgcccgaagaaaacgcgaggggaggggctccctgctcacctgtggtgatgtcgaagagaaccctgggccgatgtgtcctcagaagctaaccatctcctggtttgccatcgttttgctggtgtctccactcatggccatgtgggagctggagaaagacgtttatgttgtagaggtggactggactcccgatgcccctggagaaacagtgaacctcacctgtgacacgcctgaagaagatgacatcacctggacctcagaccagagacatggagtcataggctctggaaagaccctgaccatcactgtcaaagagtttctagatgctggccagtacacctgccacaaaggaggcgagactctgagccactcacatctgctgctccacaagaaggaaaatggaatttggtccactgaaattttaaaaaatttcaaaaacaagactttcctgaagtgtgaagcaccaaattactccggacggttcacgtgctcatggctggtgcaaagaaacatggacttgaagttcaacatcaagagcagtagcagttcccctgactctcgggcagtgacatgtggaatggcgtctctgtctgcagagaaggtcacactggaccaaagggactatgagaagtattcagtgtcctgccaggaggatgtcacctgcccaactgccgaggagaccctgcccattgaactggcgttggaagcacggcagcagaataaatatgagaactacagcaccagcttcttcatcagggacatcatcaaaccagacccgcccaagaacttgcagatgaagcctttgaagaactcacaggtggaggtcagctgggagtaccctgactcctggagcactccccattcctacttctccctcaagttctttgttcgaatccagcgcaagaaagaaaagatgaaggagacagaggaggggtgtaaccagaaaggtgcgttcctcgtagagaagacatctaccgaagtccaatgcaaaggcgggaatgtctgcgtgcaagctcaggatcgctattacaattcctcgtgcagcaagtgggcatgtgttccctgcagggtccgatccaggaggaagagagaaggcagggggagccttctcacttgcggcgatgtcgaggaaaatccggggcctatggagctggggttgagctggatctttctcctggctattctcaaaggggtgcagtgccaagttcagctggtggaaagcggaggcggagtggtgcagcccggtggatctttaaggctgagctgtgccgccagcgacagcatcgactctttagtgaacatgggctggtacagacaagctcccggcaagcagagagagctggtggctttaatcgccacctacatcacccactacgccgactttgtgaagggtcgtttcaccatctctcgtgacaacagcaagaacactttatacctccagatgaactctttaagggccgaggacaccgccgtgtactactgctacgctcgtaacatcatcgtggactactggggacaaggtactttagtgaccgtgagcagccccagggattgtggttgtaagccttgcatatgtacagtcccagaagtatcatctgtcttcatcttccccccaaagcccaaggatgtgctcaccattactctgactcctaaggtcacgtgtgttgtggtagacatcagcaaggatgatcccgaggtccagttcagctggtttgtagatgatgtggaggtgcacacagctcagacgcaaccccgggaggagcagttcaacagcactttccgctcagtcagtgaacttcccatcatgcaccaggactggctcaatggcaaggagttcaaatgcagggtcaacagtgcagctttccctgcccccatcgagaaaaccatctccaaaaccaaaggcagaccgaaggctccgcaggtgtacaccattccacctcccaaggagcagatggccaaggataaagtcagtctgacctgcatgataacagacttcttccctgaagacattactgtggagtggcagtggaatgggcagccagcggagaactacaagaacactcagcccatcatggacacagatggctcttacttcgtctacagcaagctcaatgtgcagaagagcaactgggaggcaggaaatactttcacctgctctgtgttacatgagggcctgcacaaccaccatactgagaagagcctctcccactctcctggtaaatag

SEQ ID NO: 936 - DNA, 1596 bp, synthetic construct
  source 1..1596: mol_type = other DNA
atgtgtcaccagcagctcgtgatctcgtggttctcgctcgtgttcctggcctcgccgctcgtggccatctgggagctgaagaaggacgtgtacgtcgtcgagctggactggtaccccgacgcgccgggcgagatggtcgtgctgacgtgcgacacccccgaggaggacgggatcacctggacgctcgaccagtcgtccgaggtcctggggagcggcaagaccctgaccatccaggtcaaggagttcggcgacgcggggcagtacacgtgccacaagggcggcgaggtcctcagccacagcctcctgctgctgcacaagaaagaggacggcatctggtcgacggacatcctcaaggaccagaaggagccgaagaacaagaccttcctccgctgcgaggcgaagaactactccggacgcttcacctgttggtggctgaccaccatctcgaccgacctcacgttctcggtgaagtcctcgcgcggcagctcggacccgcagggcgtgacgtgcggcgctgcgacgctctcggcggagcgcgtccgcggggacaacaaggagtacgagtactcggtggagtgccaggaggactcggcgtgcccggccgccgaggagtcgctcccgatcgaggtcatggtcgacgccgtgcacaagctcaagtacgagaactacacgtccagcttcttcatccgcgacatcatcaagcctgacccgccgaagaacctccagctgaagccgctcaagaacagccgccaggtcgaggtgtcgtgggagtacccggacacctggagcacgccgcactcctacttctccctgaccttctgcgtccaggtccagggcaagtcgaagcgcgagaagaaggaccgggtgttcaccgacaagacctcggcgaccgtgatctgccgtaagaacgcgtcgatctccgtccgggcgcaggaccggtactactccagctcgtggtcggagtgggcgtccgtgccctgcagcggcgggggcggcggcgggtccaggaacctcccggtggcgaccccggacccaggcatgttcccgtgcctgcaccactcccagaacctcctccgagcggtgagcaacatgctccaaaaggcacgccagacgctggagttctacccgtgcacctccgaggagatcgaccacgaggacatcaccaaggacaagaccagcaccgtcgaggcgtgcctcccccttgagctcacgaagaacgagtcgtgcctgaactcgcgggaaacctcgttcatcaccaacgggtcctgcctggcctctcgcaagacctccttcatgatggcgctgtgcctgagcagcatctacgaggacctcaagatgtaccaggtcgagttcaagacaatgaacgcgaagctgctcatggaccccaagcggcaaatcttcctggaccagaacatgctcgccgtgatcgacgagctcatgcaggccctgaacttcaactcggaaaccgtgccgcagaagtcctccctggaggagcccgacttctacaagacgaagatcaagctgtgcatcctcctccacgccttccgcatccgcgccgtgaccatcgaccgggtgatgtcgtacctgaacgcctcg

SEQ ID NO: 937 - DNA, 1095 bp, synthetic construct
  source 1..1095: mol_type = other DNA
atggagctcggcctgagctggatcttcctgctggcgatcctgaagggcgtgcagtgccaggtgcagctcgtggagtcgggcgggggcgtggtgcagccgggcggcagcctccgcctctcgtgcgcggcgtcggacagcatcgactcgctcgtgaacatgggctggtaccgccaggccccgggcaagcagcgcgagctcgtggccctcatcgcgacgtacatcacgcactacgcggacttcgtgaagggccggttcaccatctcgcgcgacaactccaagaacaccctgtacctccagatgaactcgctccgggccgaggacaccgccgtgtattactgctacgcgcggaacatcatcgtcgactactggggccagggcacgctcgtgacggtgagcagcgccgcggcggagtcgaagtacggaccgccctgcccgccgtgcccggcgcccgagttcctgggcgggccgtcggtgttcctgttcccgcccaagcccaaagatacgctcatgatctcccggacccccgaggtgacgtgcgtggtcgtcgacgtgtcccaggaggaccccgaggtccagttcaactggtacgtcgacggcgtcgaggtgcacaacgccaagacgaagccccgcgaggaacagttcaactcgacctaccgcgtcgtgagcgtcctgaccgtgctccaccaggattggctgaacggcaaggagtacaagtgcaaggtttccaacaagggcctgccgtcgagcatcgagaaaacgatcagcaaggccaagggccagccgcgggagccccaggtgtacaccctcccgccgtcgcaggaagagatgacgaagaaccaggtgagcttgacttgcctggtcaagggcttctacccgtccgacatcgcggtggagtgggagtccaacgggcagcccgagaataactacaagaccaccccgccggtcctcgatagcgacgggtcgttcttcctgtactcccgcctcaccgtggataagtcccgctggcaggagggtaacgtgttcagctgctcggtgatgcacgaagcgctgcacaaccactacacgcagaagtcgctgagtctgtcacccggcaag

SEQ ID NO: 938 - DNA, 1488 bp, synthetic construct
  source 1..1488: mol_type = other DNA
atggagctgggcctgtcgtggatcttcctcctcgcgatcctgaagggcgtccagtgccaggtgcagctccagcagtcgggccccgagctcgtgcggccgggcgtgtccgtcaagatcagctgcaagggctcgggctacaccttcaccgactacgcgatgcactgggtgaagcagtcgcacgcgaagtcgctggagtggatcggcgtgatctccacctacagctccaacacgaactacaaccagaagttcaagggcaaggccaccatgaccgtcgacaagtcgtcgtcgaccgcgtacatggaactggcgcgcctcacgtccgaggattccgcgatctactactgcgcgcgggacgacgggcactacgtgtacgcgatggactactggggccagggaacgtcggtgacggtgtcgtccgggggcgggggcagcggcgggggcggctccggcggcggcggcagcgacgtcgtgctgacccagaccccgctcagcctcccggtcaacatcggggaccaggcctcgatctcgtgcaagagcaccaagtccctcctgaacagcgacgggttcacctacctcgactggtacctccagaagcctggccagagtccgcagctcctcatctacctcgtgtcgaaccgcttctcgggtgtgccggaccgcttctctggcagcggctccgggacggacttcacgctgaagatcagccgggtcgaggccgaggacctgggcgtgtactactgcttccagtccaactacctgtacacgttcgggggcgggaccaagctggagatcaagccgaagtcgtgcgacaagacgcacacgtgcccgccgtgcccggcgcccgagctcctgggcgggcccgacgtgttcctgttcccgcccaagcccaaagacaccctcatgatctcgcgcacgcccgaggtgacgtgcgtcgtggtcgacgtgtcccacgaggaccccgaggtgaagttcaactggtacgtggacggcgtcgaggtgcacaacgccaagaccaagccgcgcgaggagcagtacaactcaacctaccgcgtggtgtccgtcctcaccgtgctgcaccaggactggctgaacggcaaggagtataagtgcaaggtcagcaacaaggccctgccgctgcccgaagagaaaaccatctcgaaggccaagggccagccccgcgagccccaggtctacacgctcccgccgagccgcgacgagctgaccaagaaccaggtcagcctgacgtgcctggtgaagggcttctacccgtcggacatcgcggtcgagtgggagtcgaacgggcagccggagaacaactacaagaccaccccgccggtgctcgactcggacggctccttcttcctctacagcaagctcacggtcgataagtcgcggtggcaacagggcaacgtgttctcctgctcggtgatgcacgaggccctccacaaccactacacccagaagtcgctgagcctctccccgggcaag

SEQ ID NO: 939 - DNA, 798 bp, synthetic construct
  source 1..798: mol_type = other DNA
atgcacgtgaacggcaaggtcgccctggtcaccggggcggcgcagggcatcgggcgcgcgttcgccgaggccctgctgctgaagggcgccaaggtcgcgctcgtggactggaacctggaggccggcgtgcagtgcaaggccgcgctggacgagcagttcgagccgcaaaagaccctgttcatccagtgcgacgtggcggaccagcagcagctccgggacacgttccgcaaggtcgtggaccacttcgggcgcctcgacatcctcgtgaacaacgccggtgtgaacaacgagaagaactgggaaaagaccctccagatcaacctcgtgagcgtgatctccggcacgtacctcggcctggactacatgtccaagcagaacggcggcgagggcggcatcatcatcaacatgtcctcgctggcgggcctcatgccggtcgcgcagcagcccgtctactgcgcctcgaagcacgggatcgtcggcttcacgcgctcggcggccctcgcggcgaacctcatgaactcgggagtgcggctgaacgcgatctgcccggggttcgtgaacaccgcgatcctggagagcatcgagaaagaggagaacatgggccagtacatcgagtacaaagaccacatcaaggacatgatcaagtactacgggatcctcgatccgccgctcatcgcgaacggcctcatcaccctgatcgaggacgacgccctcaacggcgcgatcatgaagatcaccacgagcaagggcatccacttccaggactacgacaccacccccttccaggccaagacgcag

SEQ ID NO: 940 - DNA, 957 bp, synthetic construct
  source 1..957: mol_type = other DNA
atggagctcggcctctcgtggatcttcctcctggccatcctgaagggcgtgcagtgcatgtgcatgccctgcttcacgacggaccaccagatggcgcgcaagtgcgacgactgctgcgggggcaagggccggggcaagtgctacgggccgcagtgcctgtgccggggaggaggggggagtggaggtggtggaagtggtggaggcggtagtgacgtgcagctcgtgcagtccggcgccgaggtgaagaagcccggggcgtcggtcaaggtcagctgcaaggccagcggatacaccttcacccgctacacgatgcactgggtgcgccaggcgccggggcagggcctggagtggatcgggtacatcaacccgagccgcggctacaccaactacgcggactccgtgaagggccgcttcacgatcacgaccgacaagagcacctcgaccgcgtacatggagctgtcctcgctccggtccgaggacacggcgacctactattgcgcgcgctactacgacgaccactactgcctggactactgggggcagggcaccaccgtgaccgtgtcgtcgggcgagggcacgagcaccgggtcgggcggcagcgggggctccggcggcgccgatgacatcgtgctcacccagtccccggcgacgctctcgctctcgccgggcgagcgggccaccctgtcctgccgcgcctcgcagagcgtgtcgtacatgaactggtaccagcagaagcccggcaaggccccgaagcgctggatctacgacacgtccaaggtcgcgtccggcgtcccggcgcggttctcgggctcggggtcgggcacggactactcgctgaccatcaactcgctggaagccgaggacgcggcgacgtactactgccagcagtggtccagcaaccccctcaccttcggcggcgggaccaaggtcgagatcaagcaccaccaccatcaccac

SEQ ID NO: 941 - DNA, 957 bp, synthetic construct
  source 1..957: mol_type = other DNA
atggagctcggcctctcgtggatcttcctcctggccatcctgaagggcgtgcagtgcgacgtgcagctcgtgcagtccggcgccgaggtgaagaagcccggggcgtcggtcaaggtcagctgcaaggccagcggatacaccttcacccgctacacgatgcactgggtgcgccaggcgccggggcagggcctggagtggatcgggtacatcaacccgagccgcggctacaccaactacgcggactccgtgaagggccgcttcacgatcacgaccgacaagagcacctcgaccgcgtacatggagctgtcctcgctccggtccgaggacacggcgacctactattgcgcgcgctactacgacgaccactactgcctggactactgggggcagggcaccaccgtgaccgtgtcgtcgggcgagggcacgagcaccgggtcgggcggcagcgggggctccggcggcgccgatgacatcgtgctcacccagtccccggcgacgctctcgctctcgccgggcgagcgggccaccctgtcctgccgcgcctcgcagagcgtgtcgtacatgaactggtaccagcagaagcccggcaaggccccgaagcgctggatctacgacacgtccaaggtcgcgtccggcgtcccggcgcggttctcgggctcggggtcgggcacggactactcgctgaccatcaactcgctggaagccgaggacgcggcgacgtactactgccagcagtggtccagcaaccccctcaccttcggcggcgggaccaaggtcgagatcaagggaggaggggggagtggaggtggtggaagtggtggaggcggtagtatgtgcatgccctgcttcacgacggaccaccagatggcgcgcaagtgcgacgactgctgcgggggcaagggccggggcaagtgctacgggccgcagtgcctgtgccggcaccaccaccatcaccac

SEQ ID NO: 942 - protein, 269 aa, Herpes simplex virus 1
MAARTRSLVERRRVLMAGVRSHTRFYKALAEEVREFHATKICGTLLTLLSGSLQGRSVFEATRVTLICEVDLGPRRPDCICVFEFANDKTLGGVCVIIELKTCKYISSGDTASKREQRATGMKQLRHSLKLLQSLAPPGDKIVYLCPVLVFVAQRTLRVSRVTRLVPQKVSGNITAVVRMLQSLSTYTVPMEPRTQRARRRRGGAARGSASRPKRSHSGARDPPEPAARQLPPADQTPASTEGGGVLKRIAALFCVPVATKTKPRAASE

SEQ ID NO: 943 - protein, 838 aa, Herpes simplex virus 1
MGNGLWFVGVIILGVAWGQVHDWTEQTDPWFLDGLGMDRMYWRDTNTGRLWLPNTPDPQKPPRGFLAPPDELNLTTASLPLLRWYEERFCFVLVTTAEFPRDPGQLLYIPKTYLLGRPPNASLPAPTTVEPTAQPPPSVAPLKGLLHNPAASVLLRSRAWVTFSAVPDPEALTFPRGDNVATASHPSGPRDTPPPRPPVGARRHPTTELDITHLHNASTTWLATRGLLRSPGRYVYFSPSASTWPVGIWTTGELVLGCDAALVRARYGREFMGLVISMHDSPPVEVMVVPAGQTLDRVGDPADENPPGALPGPPGGPRYRVFVLGSLTRADNGSALDALRRVGGYPEEGTNYAQFLSRAYAEFFSGGAGAEQGPRPPFFWRLTGLLATSGFAFVNAAHANGAVCLSDLLGFLAHSRALAGLAARGAAGCAADSVFFNVSVLDPTARLQLEARLQHLVAEILEREQSLALHALGYQLAFVLDSPSAYDAVAPSAAHLIDALYAEFLGGRVLTTPVVHRALFYASAVLRQPFLAGVPSAVQRERARRSLLIASALCTSDVAAATNADLRTALARADHQKTLFWLPDHFSPCAASLRFDLDESVFILDALAQATRSETPVEVLAQQTHGLASTLTRWAHYNALIRAFVPEASHRCGGQSANVEPRILVPITHNASYVVTHSPLPRGIGYKLTGVDVRRPLFLTYLTATCEGSTRDIESKRLVRTQNQRDLGLVGAVFMRYTPAGEVMSVLLVDTDNTQQQIAAGPTEGAPSVFSSDVPSTALLLFPNGTVIHLLAFDTQPVAAIAPGFLAASALGVVMITAALAGILKVLRTSVPFFWRRE

SEQ ID NO: 944 - protein, 222 aa, Herpes simplex virus 1
MTMRDDLPLVDRDLVDEAAFGGEEGELPLEEQFSLSSYGTSDFFVSSAYSRLPPHTQPVFSKRVILFLWSFLVLKPLEMVAAGMYYGLTGRVVAPACILAAIVGYYVTWAVRALLLYVNIKRDRLPLSAPVFWGMSVFLGGTALCALFAAAHETFSPDGLFHFIATNQMLPPTDPLRIRALGIACVAGASMWVAAADSFAASANFFLARFWTRAILNAPVAF
